United States Patent Application Publication US 2026/0132425 A1 - sequence listing, part 2

SEQ ID NO: 17101 - protein, 426 aa, synthetic construct
DTSNLMEQILSSDNLNRAYLQVVRNKGAEGVDGMKYTELKEHLAKNGETIKGQLRTRKYKPQPARRVEIPKPDGGVRNLGVPTVTDRFIQQAIAQVLTPIYEEQFHDHSYGFRPNRCAQQAILTALNIMNDGNDWIVDIDLEKFFDTVNHDKLMTLIGRTIKDGDVISIVRKYLVSGIMIDDEYEDSIVGTPQGGNLSPLLANIMLNELDKEMEKRGLNFVRYADDCIIMVGSEMSANRVMRNISRFIEEKLGLKVNMTKSKVDRPSGLKYLGFGFYFDPRAHQFKAKPHAKSVAKFKKRMKELTCRSWGVSNSYKVEKLNQLIRGWINYFKIGSMKTLCKELDSRIRYRLRMCIWKQWKTPQNQEKNLVKLGIDRNTARRVAYTGKRIAYVCNKGAVNVAISNKRLASFGLISMLDYYIEKCVTC

SEQ ID NO: 17102-18000 - skipped (899 entries)

SEQ ID NO: 18001 - protein, 122 aa, synthetic construct
MASNFTQFVLVDNGGTGDVTVAPSNFANGIAEWISSNSRSQAYKVTCSVRQSSAQNRKYTIKVEVPKGAWRSYLNMELTIPIFATNSDCELIVKAMQGLLKDGNPIPSAIAANSGIYGSGRA

SEQ ID NO: 18002 - protein, 117 aa, synthetic construct
MASNFTQFVLVDNGGTGDVTVAPSNFANGIAEWISSNSRSQAYKVTCSVRQSSAQNRKYTIKVEVPKGAWRSYLNMELTIPIFATNSDCELIVKAMQGLLKDGNPIPSAIAANSGIY

SEQ ID NO: 18003 - protein, 114 aa, synthetic construct
NFTQFVLVDNGGTGDVTVAPSNFANGIAEWISSNSRSQAYKVTCSVRQSSAQNRKYTIKVEVPKGAWRSYLNMELTIPIFATNSDCELIVKAMQGLLKDGNPIPSAIAANSGIY

SEQ ID NO: 18004 - protein, 130 aa, synthetic construct
MASNFTQFVLVDNGGTGDVTVAPSNFANGVAEWISSNSRSQAYKVTCSVRQSSAQKRKYTIKVEVPKVATQTVGGVELPVAAWRSYLNMELTIPIFATNSDCELIVKAMQGLLKDGNPIPSAIAANSGLY

SEQ ID NO: 18005 - protein, 232 aa, synthetic construct
MASNFTQFVLVDNGGTGDVTVAPSNFANGIAEWISSNSRSQAYKVTCSVRQSSAQNRKYTIKVEVPKGAWRSYLNMELTIPIFATNSDCELIVKAMQGLLKDGNPIPSAIAANSGIYANFTQFVLVDNGGTGDVTVAPSNFANGIAEWISSNSRSQAYKVTCSVRQSSAQNRKYTIKVEVPKGAWRSYLNMELTIPIFATNSDCELIVKAMQGLLKDGNPIPSAIAANSGIY

SEQ ID NO: 18006 - protein, 480 aa, synthetic construct
MASNFTQFVLVDNGGTGDVTVAPSNFANGIAEWISSNSRSQAYKVTCSVRQSSAQNRKYTIKVEVPKGAWRSYLNMELTIPIFATNSDCELIVKAMQGLLKDGNPIPSAIAANSGIYANFTQFVLVDNGGTGDVTVAPSNFANGIAEWISSNSRSQAYKVTCSVRQSSAQNRKYTIKVEVPKGAWRSYLNMELTIPIFATNSDCELIVKAMQGLLKDGNPIPSAIAANSGIYGGGSGGGSGGGSGGGSMASNFTQFVLVDNGGTGDVTVAPSNFANGIAEWISSNSRSQAYKVTCSVRQSSAQNRKYTIKVEVPKGAWRSYLNMELTIPIFATNSDCELIVKAMQGLLKDGNPIPSAIAANSGIYANFTQFVLVDNGGTGDVTVAPSNFANGIAEWISSNSRSQAYKVTCSVRQSSAQNRKYTIKVEVPKGAWRSYLNMELTIPIFATNSDCELIVKAMQGLLKDGNPIPSAIAANSGIY

SEQ ID NO: 18007 - protein, 130 aa, synthetic construct
MGSMSKTIVLSVGEATRTLTEIQSTADRQIFEEKVGPLVGRLRLTASLRQNGAKTAYRVNLKLDQADVVDSGLPKVRYTQVWSHDVTIVANSTEASRKSLYDLTKSLVATSQVEDLVVNLVPLGRGSGRA

SEQ ID NO: 18008 - protein, 127 aa, synthetic construct
MSKTIVLSVGEATRTLTEIQSTADRQIFEEKVGPLVGRLRLTASLRQNGAKTAYRVNLKLDQADVVDSGLPKVRYTQVWSHDVTIVANSTEASRKSLYDLTKSLVATSQVEDLVVNLVPLGRGSGRA

SEQ ID NO: 18009 - protein, 70 aa, synthetic construct
MGSMKSIRCKNCNKLLFKADSFDHIEIRCPRCKRHIIMLNACEHPTEKHCGKREKITHSDETVRYGSGRA

SEQ ID NO: 18010 - protein, 67 aa, synthetic construct
MKSIRCKNCNKLLFKADSFDHIEIRCPRCKRHIIMLNACEHPTEKHCGKREKITHSDETVRYGSGRA

SEQ ID NO: 18011 - protein, 125 aa, synthetic construct
YVRFEVPEDMQNEALSLLEKVRESGKVKKGTNRTTHAVYRGLAKLVYIAEDVDPPEIVAHLPLLCEEKNVPYIYVKSKNDLGRAVGGWPIGASAAIINEGELRKELGSLVEKIKGLQKRSHMHLE

SEQ ID NO: 18012 - protein, 125 aa, synthetic construct
YVRFEVPEDMQNEALSLLEKVRESGKVKKGTNSTTLAVSRGLAKLVYIAEDVDPPEIVAHLPLLCEEKNVPYIYVKSKNDLGRAVGRVYPGASAAIINEGELRKELGSLVEKIKGLQKRSHMHLE

SEQ ID NO: 18013 - protein, 22 aa, synthetic construct
MDAQTRRRERRAEKQAQWKAAN

SEQ ID NO: 18014 - protein, 119 aa, synthetic construct
MYVRFEVPEDMQNEALSLLEKVRESGKVKKGTNETTKAVERGLAKLVYIAEDVDPPEIVAHLPLLCEEKNVPYIYVKSKNDLGRAVGIEVPCASAAIINEGELRKELGSLVEKIKGLQK

SEQ ID NO: 18015 - protein, 125 aa, synthetic construct
YVRFEVPEDMQNEALSLLEKVRESGKVKKGTNETTKAVERGLAKLVYIAEDVDPPEIVAHLPLLCEEKNVPYIYVKSKNDLGRAVGIEVPCASAAIINEGELRKELGSLVEKIKGLQKRSHMHLE

SEQ ID NO: 18016 - protein, 11 aa, synthetic construct
PAAKRVKLDGG

SEQ ID NO: 18017 - protein, 19 aa, synthetic construct
KRTADGSEFESPKKKAKVE

SEQ ID NO: 18018-18100 - skipped (83 entries)

SEQ ID NO: 18101 - DNA, 50 bp, synthetic construct
  source 1..50: mol_type = other DNA
gggtcaggagcccccccctgaacccaggataaccctcaaagtcggggggc

SEQ ID NO: 18102 - DNA, 16 bp, synthetic construct
  source 1..16: mol_type = other DNA
gcgcgctcgctcgctc

SEQ ID NO: 18103 - protein, 4 aa, unidentified
YADD

SEQ ID NO: 18104 - protein, 4 aa, unidentified
YMDD

SEQ ID NO: 18105 - protein, 4 aa, unidentified
YVDD

SEQ ID NO: 18106 - protein, 673 aa, Reticuloendotheliosis virus
TAPLEEEYRLFLEAPIQNVTLLEQWKREIPKVWAEINPPGLASTQAPIHVQLLSTALPVRVRQYPITLEAKRSLRETIRKFRAAGILRPVHSPWNTPLLPVRKSGTSEYRMVQDLREVNKRVETIHPTVPNPYTLLSLLPPDRIWYSVLDLKDAFFCIPLAPESQLIFAFEWADAEEGESGQLTWTRLPQGFKNSPTLFDEALNRDLQGFRLDHPSVSLLQYVDDLLIAADTQAACLSATRDLLMTLAELGYRVSGKKAQLCQEEVTYLGFKIHKGSRSLSNSRTQAILQIPVPKTKRQVREFLGTIGYCRLWIPGFAELAQPLYAATRGGNDPLVWGEKEEEAFQSLKLALTQPPALALPSLDKPFQLFVEETSGAAKGVLTQALGPWKRPVAYLSKRLDPVAAGWPRCLRAIAAAALLTREASKLTFGQDIEITSSHNLESLLRSPPDKWLTNARITQYQVLLLDPPRVRFKQTAALNPATLLPETDDTLPIHHCLDTLDSLTSTRPDLTDQPLAQAEATLFTDGSSYIRDGKRYAGAAVVTLDSVIWAEPLPIGTSAQKAELIALTKALEWSKDKSVNIYTDSRYAFATLHVHGMIYRERGLLTAGGKAIKNAPEILALLTAVWLPKRVAVMHCKGHQKDDAPTSTGNRRADEVAREVAIRPLSTQATIS

SEQ ID NO: 18107 - protein, 673 aa, synthetic construct
TAPLEEEYRLFLEAPIQNVTLLEQWKREIPKVWAEINPPGLASTQAPIHVQLLSTALPVRVRQYPITLEAKRSLRETIRKFRAAGILRPVHSPWNTPLLPVRKSGTSEYRMVQDLREVNKRVETIHPTVPNPYTLLSLLPPDRIWYSVLDLKDAFFCIPLAPESQLIFAFEWADAEEGESGQLTWTRLPQGFKNSPTLFNEALNRDLQGFRLDHPSVSLLQYVDDLLIAADTQAACLSATRDLLMTLAELGYRVSGKKAQLCQEEVTYLGFKIHKGSRSLSNSRTQAILQIPVPKTKRQVREFLGTIGYCRLWIPGFAELAQPLYAATRPGNDPLVWGEKEEEAFQSLKLALTQPPALALPSLDKPFQLFVEETSGAAKGVLTQALGPWKRPVAYLSKRLDPVAAGWPRCLRAIAAAALLTREASKLTFGQDIEITSSHNLESLLRSPPDKWLTNARITQYQVLLLDPPRVRFKQTAALNPATLLPETDDTLPIHHCLDTLDSLTSTRPDLTDQPLAQAEATLFTDGSSYIRDGKRYAGAAVVTLDSVIWAEPLPIGTSAQKAELIALTKALEWSKDKSVNIYTDSRYAFATLHVHGMIYRERGWLTAGGKAIKNAPEILALLTAVWLPKRVAVMHCKGHQKDDAPTSTGNRRADEVAREVAIRPLSTQATIS

SEQ ID NO: 18108 - protein, 677 aa, Baboon endogenous virus
TVSLQDEHRLFDIPVTTSLPDVWLQDFPQAWAETGGLGRAKCQAPIIIDLKPTAVPVSIKQYPMSLEAHMGIRQHIIKFLELGVLRPCRSPWNTPLLPVKKPGTQDYRPVQDLREINKRTVDIHPTVPNPYNLLSTLKPDYSWYTVLDLKDAFFCLPLAPQSQELFAFEWKDPERGISGQLTWTRLPQGFKNSPTLFDEALHRDLTDFRTQHPEVTLLQYVDDLLLAAPTKKACTQGTRHLLQELGEKGYRASAKKAQICQTKVTYLGYILSEGKRWLTPGRIETVARIPPPRNPREVREFLGTAGFCRLWIPGFAELAAPLYALTKESTPFTWQTEHQLAFEALKKALLSAPALGLPDTSKPFTLFLDERQGIAKGVLTQKLGPWKRPVAYLSKKLDPVAAGWPPCLRIMAATAMLVKDSAKLTLGQPLTVITPHTLEAIVRQPPDRWITNARLTHYQALLLDTDRVQFGPPVTLNPATLLPVPENQPSPHDCRQVLAETHGTREDLKDQELPDADHTWYTDGSSYLDSGTRRAGAAVVDGHNTIWAQSLPPGTSAQKAELIALTKALELSKGKKANIYTDSRYAFATAHTHGSIYERRGLLTSEGKEIKNKAEIIALLKALFLPQEVAIIHCPGHQKGQDPVAVGNRQADRVARQAAMAEVLTLATEPDNTSHIT

SEQ ID NO: 18109 - protein, 677 aa, synthetic construct
TVSLQDEHRLFDIPVTTSLPDVWLQDFPQAWAETGGLGRAKCQAPIIIDLKPTAVPVSIKQYPMSLEAHMGIRQHIIKFLELGVLRPCRSPWNTPLLPVKKPGTQDYRPVQDLREINKRTVDIHPTVPNPYNLLSTLKPDYSWYTVLDLKDAFFCLPLAPQSQELFAFEWKDPERGISGQLTWTRLPQGFKNSPTLFNEALHRDLTDFRTQHPEVTLLQYVDDLLLAAPTKKACTQGTRHLLQELGEKGYRASAKKAQICQTKVTYLGYILSEGKRWLTPGRIETVARIPPPRNPREVREFLGTAGFCRLWIPGFAELAAPLYALTKPSTPFTWQTEHQLAFEALKKALLSAPALGLPDTSKPFTLFLDERQGIAKGVLTQKLGPWKRPVAYLSKKLDPVAAGWPPCLRIMAATAMLVKDSAKLTLGQPLTVITPHTLEAIVRQPPDRWITNARLTHYQALLLDTDRVQFGPPVTLNPATLLPVPENQPSPHDCRQVLAETHGTREDLKDQELPDADHTWYTDGSSYLDSGTRRAGAAVVDGHNTIWAQSLPPGTSAQKAELIALTKALELSKGKKANIYTDSRYAFATAHTHGSIYERRGWLTSEGKEIKNKAEIIALLKALFLPQEVAIIHCPGHQKGQDPVAVGNRQADRVARQAAMAEVLTLATEPDNTSHIT

SEQ ID NO: 18110 - protein, 677 aa, synthetic construct
TVSLQDEHRLFDIPVTTSLPDVWLQDFPQAWAETGGLGRAKCQAPIIIDLKPTAVPVSIKQYPMSLEAHMGIRQHIIKFLELGVLRPCRSPWNTPLLPVKKPGTQDYRPVQDLREINKRTVDIHPTVPNPYNLLSTLKPDYSWYTVLDLKDAFFCLPLAPQSQELFAFEWKDPERGISGQLTWTRLPQGFKNSPTLFNEALHRDLTDFRTQHPEVTLLQYVDDLLLAAPTKKACTQGTRHLLQELGEKGYRASAKKAQICQTKVTYLGYILSEGKRWLTPGRIETVARIPPPRNPREVREFLGKAGFCRLFIPGFAELAAPLYALTKPSTPFTWQTEHQLAFEALKKALLSAPALGLPDTSKPFTLFLDERQGIAKGVLTQKLGPWKRPVAYLSKKLDPVAAGWPPCLRIMAATAMLVKDSAKLTLGQPLTVITPHTLEAIVRQPPDRWITNARLTHYQALLLDTDRVQFGPPVTLNPATLLPVPENQPSPHDCRQVLAETHGTREDLKDQELPDADHTWYTDGSSYLDSGTRRAGAAVVDGHNTIWAQSLPPGTSAQKAELIALTKALELSKGKKANIYTDSRYAFATAHTHGSIYERRGWLTSEGKEIKNKAEIIALLKALFLPQEVAIIHCPGHQKGQDPVAVGNRQADRVARQAAMAEVLTLATEPDNTSHIT

SEQ ID NO: 18111 - protein, 576 aa, Bovine leukemia virus
GVLDAPPSHIGLEHLPPPPEVPQFPLNLERLQALQDLVHRSLEAGYISPWDGPGNNPVFPVRKPNGAWRFVHDLRVTNALTKPIPALSPGPPDLTAIPTHLPHIICLDLKDAFFQIPVEDRFRSYFAFTLPTPGGLQPHRRFAWRVLPQGFINSPALFERALQEPLRQVSAAFSQSLLVSYMDDILYVSPTEEQRLQCYQTMAAHLRDLGFQVASEKTRQTPSPVPFLGQMVHERMVTYQSLPTLQISSPISLHQLQTVLGDLQWVSRGTPTTRRPLQLLYSSLKGIDDPRAIIHLSPEQQQGIAELRQALSHNARSRYNEQEPLLAYVHLTRAGSTLVLFQKGAQFPLAYFQTPLTDNQASPWGLLLLLGCQYLQAQALSSYAKTILKYYHNLPKTSLDNWIQSSEDPRVQELLQLWPQISSQGIQPPGPWKTLVTRAEVFLTPQFSPEPIPAALCLFSDGAARRGAYCLWKDHLLDFQAVPAPESAQKGELAGLLAGLAAAPPEPLNIWVDSKYLYSLLRTLVLGAWLQPDPVPSYALLYKSLLRHPAIFVGHVRSHSSASHPIASLNNYVDQL

SEQ ID NO: 18112 - protein, 576 aa, synthetic construct
GVLDAPPSHIGLEHLPPPPEVPQFPLNLERLQALQDLVHRSLEAGYISPWDGPGNNPVFPVRKPNGAWRFVHDLRVTNALTKPIPALSPGPPDLTAIPTHLPHIICLDLKDAFFQIPVEDRFRSYFAFTLPTPGGLQPHRRFAWRVLPQGFINSPALFQRALQEPLRQVSAAFSQSLLVSYMDDILYVSPTEEQRLQCYQTMAAHLRDLGFQVASEKTRQTPSPVPFLGQMVHERMVTYQSLPTLQISSPISLHQLQTVLGDLQWVSRGTPTTRRPLQLLYSSLKPIDDPRAIIHLSPEQQQGIAELRQALSHNARSRYNEQEPLLAYVHLTRAGSTLVLFQKGAQFPLAYFQTPLTDNQASPWGLLLLLGCQYLQAQALSSYAKTILKYYHNLPKTSLDNWIQSSEDPRVQELLQLWPQISSQGIQPPGPWKTLVTRAEVFLTPQFSPEPIPAALCLFSDGAARRGAYCLWKDHLLDFQAVPAPESAQKGELAGLLAGLAAAPPEPLNIWVDSKYLYSLLRTLVLGAWLQPDPVPSYALLYKSLLRHPAIFVGHVRSHSSASHPIASLNNYVDQL

SEQ ID NO: 18113 - protein, 576 aa, Bovine leukemia virus
GVLDTPPSHIGLEHLPPPPEVPQFPLNLERLQALQDLVHRSLEAGYISPWDGPGNNPVFPVRKPNGAWRFVHDLRATNALTKPIPALSPGPPDLTAIPTHPPHIICLDLKDAFFQIPVEDRFRFYLSFTLPSPGGLQPHRRFAWRVLPQGFINSPALFERALQEPLRQVSAAFSQSLLVSYMDDILYASPTEEQRSQCYQALAARLRDLGFQVASEKTSQTPSPVPFLGQMVHEQIVTYQSLPTLQISSPISLHQLQAVLGDLQWVSRGTPTTRRPLQLLYSSLKRHHDPRAIIQLSPEQLQGIAELRQALSHNARSRYNEQEPLLAYVHLTRAGSTLVLFQKGAQFPLAYFQTPLTDNQASPWGLLLLLGCQYLQTQALSSYAKPILKYYHNLPKTSLDNWIQSSEDPRVQELLQLWPQISSQGIQPPGPWKTLITRAEVFLTPQFSPDPIPAALCLFSDGATGRGAYCLWKDHLLDFQAVPAPESAQKGELAGLLAGLAAAPPEPVNIWVDSKYLYSLLRTLVLGAWLQPDPVPSYALLYKSLLRHPAIVVGHVRSHSSASHPIASLNNYVDQL

SEQ ID NO: 18114 - protein, 576 aa, synthetic construct
GVLDTPPSHIGLEHLPPPPEVPQFPLNLERLQALQDLVHRSLEAGYISPWDGPGNNPVFPVRKPNGAWRFVHDLRATNALTKPIPALSPGPPDLTAIPTHPPHIICLDLKDAFFQIPVEDRFRFYLSFTLPSPGGLQPHRRFAWRVLPQGFINSPALFNRALQEPLRQVSAAFSQSLLVSYMDDILYASPTEEQRSQCYQALAARLRDLGFQVASEKTSQTPSPVPFLGQMVHEQIVTYQSLPTLQISSPISLHQLQAVLGDLQWVSRGTPTTRRPLQLLYSSLKRHHDPRAIIQLSPEQLQGIAELRQALSHNARSRYNEQEPLLAYVHLTRAGSTLVLFQKGAQFPLAYFQTPLTDNQASPWGLLLLLGCQYLQTQALSSYAKPILKYYHNLPKTSLDNWIQSSEDPRVQELLQLWPQISSQGIQPPGPWKTLITRAEVFLTPQFSPDPIPAALCLFSDGATGRGAYCLWKDHLLDFQAVPAPESAQKGELAGLLAGLAAAPPEPVNIWVDSKYLYSLLRTWVLGAWLQPDPVPSYALLYKSLLRHPAIVVGHVRSHSSASHPIASLNNYVDQL

SEQ ID NO: 18115 - protein, 576 aa, synthetic construct
GVLDTPPSHIGLEHLPPPPEVPQFPLNLERLQALQDLVHRSLEAGYISPWDGPGNNPVFPVRKPNGAWRFVHDLRATNALTKPIPALSPGPPDLTAPPTHPPHIICLDLKDAFFQIPVEDRFRFYLSFTLPSPGGLQPHRRFAWRVLPQGFINSPALFQRALQEPLRQVSAAFSQSLLVSYMDDILYASPTEEQRSQCYQALAARLRDLGFQVASEKTSQTPSPVPFLGQMVHEQIVTYQSLPTLQISSPISLHQLQAVLGDLQWVSRGTPTTRRPLQLLYSSLKRHHDPRAIIQLSPEQLQGIAELRQALSHNARSRYNEQEPLLAYVHLTRAGSTLVLFQKGAQFPLAYFQTPLTDNQASPWGLLLLLGCQYLQTQALSSYAKPILKYYHNLPKTSLDNWIQSSEDPRVQELLQLWPQISSQGIQPPGPWKTLITRAEVFLTPQFSPDPIPAALCLFSDGATGRGAYCLWKDHLLDFQAVPAPESAQKGELAGLLAGLAAAPPEPVNIWVDSKYLYSLLRTWVLGAWLQPDPVPSYALLYKSLLRHPAIVVGHVRSHSSASHPIASLNNYVDQL

SEQ ID NO: 18116 - protein, 748 aa, Feline foamy virus
MDLLKPLTVERKGVKIKGYWNSQADITCVPKDLLQGEEPVRQQNVTTIHGTQEGDVYYVNLKIDGRRINTEVIGTTLDYAIITPGDVPWILKKPLELTIKLDLEEQQGTLLNNSILSKKGKEELKQLFEKYSALWQSWENQVGHRRIRPHKIATGTVKPTPQKQYHINPKAKPDIQIVINDLLKQGVLIQKESTMNTPVYPVPKPNGRWRMVLDYRAVNKVTPLIAVQNQHSYGILGSLFKGRYKTTIDLSNGFWAHPIVPEDYWITAFTWQGKQYCWTVLPQGFLNSPGLFTGDVVDLLQGIPNVEVYVDDVYISHDSEKEHLEYLDILFNRLKEAGYIISLKKSNIANSIVDFLGFQITNEGRGLTDTFKEKLENITAPTTLKQLQSILGLLNFARNFIPDFTELIAPLYALIPKSTKNYVPWQIEHSTTLETLITKLNGAEYLQGRKGDKTLIMKVNASYTTGYIRYYNEGEKKPISYVSIVFSKTELKFTELEKLLTTVHKGLLKALDLSMGQNIHVYSPIVSMQNIQKTPQTAKKALASRWLSWLSYLEDPRIRFFYDPQMPALKDLPAVDTGKDNKKHPSNFQHIFYTDGSAITSPTKEGHLNAGMGIVYFINKDGNLQKQQEWSISLGNHTAQFAEIAAFEFALKKCLPLGGNILVVTDSNYVAKAYNEELDVWASNGFVNNRKKPLKHISKWKSVADLKRLRPDVVVTHEPGHQKLDSSPHAYGNNLADQLATQASFKVH

SEQ ID NO: 18117 - protein, 748 aa, synthetic construct
MDLLKPLTVERKGVKIKGYWNSQADITCVPKDLLQGEEPVRQQNVTTIHGTQEGDVYYVNLKIDGRRINTEVIGTTLDYAIITPGDVPWILKKPLELTIKLDLEEQQGTLLNNSILSKKGKEELKQLFEKYSALWQSWENQVGHRRIRPHKIATGTVKPTPQKQYHINPKAKPDIQIVINDLLKQGVLIQKESTMNTPVYPVPKPNGRWRMVLDYRAVNKVTPLIAVQNQHSYGILGSLFKGRYKTTIDLSNGFWAHPIVPEDYWITAFTWQGKQYCWTVLPQGFLNSPGLFNGDVVDLLQGIPNVEVYVDDVYISHDSEKEHLEYLDILFNRLKEAGYIISLKKSNIANSIVDFLGFQITNEGRGLTDTFKEKLENITAPTTLKQLQSILGLLNFARNFIPDFTELIAPLYALIPKSPKNYVPWQIEHSTTLETLITKLNGAEYLQGRKGDKTLIMKVNASYTTGYIRYYNEGEKKPISYVSIVFSKTELKFTELEKLLTTVHKGLLKALDLSMGQNIHVYSPIVSMQNIQKTPQTAKKALASRWLSWLSYLEDPRIRFFYDPQMPALKDLPAVDTGKDNKKHPSNFQHIFYTDGSAITSPTKEGHLNAGMGIVYFINKDGNLQKQQEWSISLGNHTAQFAEIAAFEFALKKCLPLGGNILVVTDSNYVAKAYNEELDVWASNGFVNNRKKPLKHISKWKSVADLKRLRPDVVVTHEPGHQKLDSSPHAYGNNLADQLATQASFKVH

SEQ ID NO: 18118 - protein, 748 aa, synthetic construct
MDLLKPLTVERKGVKIKGYWNSQADITCVPKDLLQGEEPVRQQNVTTIHGTQEGDVYYVNLKIDGRRINTEVIGTTLDYAIITPGDVPWILKKPLELTIKLDLEEQQGTLLNNSILSKKGKEELKQLFEKYSALWQSWENQVGHRRIRPHKIATGTVKPTPQKQYHINPKAKPDIQIVINDLLKQGVLIQKESTMNTPVYPVPKPNGRWRMVLDYRAVNKVTPLIAVQNQHSYGILGSLFKGRYKTTIDLSNGFWAHPIVPEDYWITAFTWQGKQYCWTVLPQGFLNSPGLFNGDVVDLLQGIPNVEVYVDDVYISHDSEKEHLEYLDILFNRLKEAGYIISLKKSNIANSIVDFLGFQITNEGRGLTDTFKEKLENITAPTTLKQLQSILGKLNFARNFIPDFTELIAPLYALIPKSPKNYVPWQIEHSTTLETLITKLNGAEYLQGRKGDKTLIMKVNASYTTGYIRYYNEGEKKPISYVSIVFSKTELKFTELEKLLTTVHKGLLKALDLSMGQNIHVYSPIVSMQNIQKTPQTAKKALASRWLSWLSYLEDPRIRFFYDPQMPALKDLPAVDTGKDNKKHPSNFQHIFYTDGSAITSPTKEGHLNAGMGIVYFINKDGNLQKQQEWSISLGNHTAQFAEIAAFEFALKKCLPLGGNILVVTDSNYVAKAYNEELDVWASNGFVNNRKKPLKHISKWKSVADLKRLRPDVVVTHEPGHQKLDSSPHAYGNNLADQLATQASFKVH

SEQ ID NO: 18119 - protein, 662 aa, Feline foamy virus
VPWILKKPLELTIKLDLEEQQGTLLNNSILSKKGKEELKQLFEKYSALWQSWENQVGHRRIRPHKIATGTVKPTPQKQYHINPKAKPDIQIVINDLLKQGVLIQKESTMNTPVYPVPKPNGRWRMVLDYRAVNKVTPLIAVQNQHSYGILGSLFKGRYKTTIDLSNGFWAHPIVPEDYWITAFTWQGKQYCWTVLPQGFLNSPGLFTGDVVDLLQGIPNVEVYVDDVYISHDSEKEHLEYLDILFNRLKEAGYIISLKKSNIANSIVDFLGFQITNEGRGLTDTFKEKLENITAPTTLKQLQSILGLLNFARNFIPDFTELIAPLYALIPKSTKNYVPWQIEHSTTLETLITKLNGAEYLQGRKGDKTLIMKVNASYTTGYIRYYNEGEKKPISYVSIVFSKTELKFTELEKLLTTVHKGLLKALDLSMGQNIHVYSPIVSMQNIQKTPQTAKKALASRWLSWLSYLEDPRIRFFYDPQMPALKDLPAVDTGKDNKKHPSNFQHIFYTDGSAITSPTKEGHLNAGMGIVYFINKDGNLQKQQEWSISLGNHTAQFAEIAAFEFALKKCLPLGGNILVVTDSNYVAKAYNEELDVWASNGFVNNRKKPLKHISKWKSVADLKRLRPDVVVTHEPGHQKLDSSPHAYGNNLADQLATQASFKVH

SEQ ID NO: 18120 - protein, 662 aa, synthetic construct
VPWILKKPLELTIKLDLEEQQGTLLNNSILSKKGKEELKQLFEKYSALWQSWENQVGHRRIRPHKIATGTVKPTPQKQYHINPKAKPDIQIVINDLLKQGVLIQKESTMNTPVYPVPKPNGRWRMVLDYRAVNKVTPLIAVQNQHSYGILGSLFKGRYKTTIDLSNGFWAHPIVPEDYWITAFTWQGKQYCWTVLPQGFLNSPGLFNGDVVDLLQGIPNVEVYVDDVYISHDSEKEHLEYLDILFNRLKEAGYIISLKKSNIANSIVDFLGFQITNEGRGLTDTFKEKLENITAPTTLKQLQSILGLLNFARNFIPDFTELIAPLYALIPKSPKNYVPWQIEHSTTLETLITKLNGAEYLQGRKGDKTLIMKVNASYTTGYIRYYNEGEKKPISYVSIVFSKTELKFTELEKLLTTVHKGLLKALDLSMGQNIHVYSPIVSMQNIQKTPQTAKKALASRWLSWLSYLEDPRIRFFYDPQMPALKDLPAVDTGKDNKKHPSNFQHIFYTDGSAITSPTKEGHLNAGMGIVYFINKDGNLQKQQEWSISLGNHTAQFAEIAAFEFALKKCLPLGGNILVVTDSNYVAKAYNEELDVWASNGFVNNRKKPLKHISKWKSVADLKRLRPDVVVTHEPGHQKLDSSPHAYGNNLADQLATQASFKVH

SEQ ID NO: 18121 - protein, 662 aa, synthetic construct
VPWILKKPLELTIKLDLEEQQGTLLNNSILSKKGKEELKQLFEKYSALWQSWENQVGHRRIRPHKIATGTVKPTPQKQYHINPKAKPDIQIVINDLLKQGVLIQKESTMNTPVYPVPKPNGRWRMVLDYRAVNKVTPLIAVQNQHSYGILGSLFKGRYKTTIDLSNGFWAHPIVPEDYWITAFTWQGKQYCWTVLPQGFLNSPGLFNGDVVDLLQGIPNVEVYVDDVYISHDSEKEHLEYLDILFNRLKEAGYIISLKKSNIANSIVDFLGFQITNEGRGLTDTFKEKLENITAPTTLKQLQSILGKLNFARNFIPDFTELIAPLYALIPKSPKNYVPWQIEHSTTLETLITKLNGAEYLQGRKGDKTLIMKVNASYTTGYIRYYNEGEKKPISYVSIVFSKTELKFTELEKLLTTVHKGLLKALDLSMGQNIHVYSPIVSMQNIQKTPQTAKKALASRWLSWLSYLEDPRIRFFYDPQMPALKDLPAVDTGKDNKKHPSNFQHIFYTDGSAITSPTKEGHLNAGMGIVYFINKDGNLQKQQEWSISLGNHTAQFAEIAAFEFALKKCLPLGGNILVVTDSNYVAKAYNEELDVWASNGFVNNRKKPLKHISKWKSVADLKRLRPDVVVTHEPGHQKLDSSPHAYGNNLADQLATQASFKVH

SEQ ID NO: 18122 - protein, 670 aa, Feline leukemia virus
TLQLEEEYRLFEPESTQKQEMDIWLKNFPQAWAETGGMGTAHCQAPVLIQLKATATPISIRQYPMPHEAYQGIKPHIRRMLDQGILKPCQSPWNTPLLPVKKPGTEDYRPVQDLREVNKRVEDIHPTVPNPYNLLSTLPPSHPWYTVLDLKDAFFCLRLHSESQLLFAFEWRDPEIGLSGQLTWTRLPQGFKNSPTLFDEALHSDLADFRVRYPALVLLQYVDDLLLAAATRTECLEGTKALLETLGNKGYRASAKKAQICLQEVTYLGYSLKDGQRWLTKARKEAILSIPVPKNSRQVREFLGTAGYCRLWIPGFAELAAPLYPLTRPGTLFQWGTEQQLAFEDIKKALLSSPALGLPDITKPFELFIDENSGFAKGVLVQKLGPWKRPVAYLSKKLDTVASGWPPCLRMVAAIAILVKDAGKLTLGQPLTILTSHPVEALVRQPPNKWLSNARMTHYQAMLLDAERVHFGPTVSLNPATLLPLPSGGNHHDCLQILAETHGTRPDLTDQPLPDADLTWYTDGSSFIRNGEREAGAAVTTESEVIWAAPLPPGTSAQRAELIALTQALKMAEGKKLTVYTDSRYAFATTHVHGEIYRRRGLLTSEGKEIKNKNEILALLEALFLPKRLSIIHCPGHQKGDSPQAKGNRLADDTAKKAATETHSSLTVLP

SEQ ID NO: 18123 - protein, 670 aa, synthetic construct
TLQLEEEYRLFEPESTQKQEMDIWLKNFPQAWAETGGMGTAHCQAPVLIQLKATATPISIRQYPMPHEAYQGIKPHIRRMLDQGILKPCQSPWNTPLLPVKKPGTEDYRPVQDLREVNKRVEDIHPTVPNPYNLLSTLPPSHPWYTVLDLKDAFFCLRLHSESQLLFAFEWRDPEIGLSGQLTWTRLPQGFKNSPTLFNEALHSDLADFRVRYPALVLLQYVDDLLLAAATRTECLEGTKALLETLGNKGYRASAKKAQICLQEVTYLGYSLKDGQRWLTKARKEAILSIPVPKNSRQVREFLGTAGYCRLWIPGFAELAAPLYPLTRPGTLFQWGTEQQLAFEDIKKALLSSPALGLPDITKPFELFIDENSGFAKGVLVQKLGPWKRPVAYLSKKLDTVASGWPPCLRMVAAIAILVKDAGKLTLGQPLTILTSHPVEALVRQPPNKWLSNARMTHYQAMLLDAERVHFGPTVSLNPATLLPLPSGGNHHDCLQILAETHGTRPDLTDQPLPDADLTWYTDGSSFIRNGEREAGAAVTTESEVIWAAPLPPGTSAQRAELIALTQALKMAEGKKLTVYTDSRYAFATTHVHGEIYRRRGWLTSEGKEIKNKNEILALLEALFLPKRLSIIHCPGHQKGDSPQAKGNRLADDTAKKAATETHSSLTVLP

SEQ ID NO: 18124 - protein, 670 aa, synthetic construct
TLQLEEEYRLFEPESTQKQEMDIWLKNFPQAWAETGGMGTAHCQAPVLIQLKATATPISIRQYPMPHEAYQGIKPHIRRMLDQGILKPCQSPWNTPLLPVKKPGTEDYRPVQDLREVNKRVEDIHPTVPNPYNLLSTLPPSHPWYTVLDLKDAFFCLRLHSESQLLFAFEWRDPEIGLSGQLTWTRLPQGFKNSPTLFNEALHSDLADFRVRYPALVLLQYVDDLLLAAATRTECLEGTKALLETLGNKGYRASAKKAQICLQEVTYLGYSLKDGQRWLTKARKEAILSIPVPKNSRQVREFLGKAGYCRLFIPGFAELAAPLYPLTRPGTLFQWGTEQQLAFEDIKKALLSSPALGLPDITKPFELFIDENSGFAKGVLVQKLGPWKRPVAYLSKKLDTVASGWPPCLRMVAAIAILVKDAGKLTLGQPLTILTSHPVEALVRQPPNKWLSNARMTHYQAMLLDAERVHFGPTVSLNPATLLPLPSGGNHHDCLQILAETHGTRPDLTDQPLPDADLTWYTDGSSFIRNGEREAGAAVTTESEVIWAAPLPPGTSAQRAELIALTQALKMAEGKKLTVYTDSRYAFATTHVHGEIYRRRGWLTSEGKEIKNKNEILALLEALFLPKRLSIIHCPGHQKGDSPQAKGNRLADDTAKKAATETHSSLTVLP

SEQ ID NO: 18125 - protein, 751 aa, unidentified
MNPLQLLQPLPAEIKGTKLLAHWNSGATITCIPESFLEDEQPIKKTLIKTIHGEKQQNVYYVTFKVKGRKVEAEVIASPYEYILLSPTDVPWLTQQPLQLTILVPLQEYQEKILSKTALPEDQKQQLKTLFVKYDNLWQHWENQVGHRKIRPHNIATGDYPPRPQKQYPINPKAKPSIQIVIDDLLKQGVLTPQNSTMNTPVYPVPKPDGRWRMVLDYREVNKTIPLTAAQNQHSAGILATIVRQKYKTTLDLANGFWAHPITPESYWLTAFTWQGKQYCWTRLPQGFLNSPALFTADVVDLLKEIPNVQVYVDDIYLSHDDPKEHVQQLEKVFQILLQAGYVVSLKKSEIGQKTVEFLGFNITKEGRGLTDTFKTKLLNITPPKDLKQLQSILGLLNFARNFIPNFAELVQPLYNLIASAKGKYIEWSEENTKQLNMVIEALNTASNLEERLPEQRLVIKVNTSPSAGYVRYYNETGKKPIMYLNYVFSKAELKFSMLEKLLTTMHKALIKAMDLAMGQEILVYSPIVSMTKIQKTPLPERKALPIRWITWMTYLEDPRIQFHYDKTLPELKHIPDVYTSSQSPVKHPSQYEGVFYTDGSAIKSPDPTKSNNAGMGIVHATYKPEYQVLNQWSIPLGNHTAQMAEIAAVEFACKKALKIPGPVLVITDSFYVAESANKELPYWKSNGFVNNKKKPLKHISKWKSIAECLSMKPDITIQHEKGISLQIPVFILKGNALADKLATQGSYVVN

SEQ ID NO: 18126 - protein, 751 aa, synthetic construct
MNPLQLLQPLPAEIKGTKLLAHWNSGATITCIPESFLEDEQPIKKTLIKTIHGEKQQNVYYVTFKVKGRKVEAEVIASPYEYILLSPTDVPWLTQQPLQLTILVPLQEYQEKILSKTALPEDQKQQLKTLFVKYDNLWQHWENQVGHRKIRPHNIATGDYPPRPQKQYPINPKAKPSIQIVIDDLLKQGVLTPQNSTMNTPVYPVPKPDGRWRMVLDYREVNKTIPLTAAQNQHSAGILATIVRQKYKTTLDLANGFWAHPITPESYWLTAFTWQGKQYCWTRLPQGFLNSPALFNADVVDLLKEIPNVQVYVDDIYLSHDDPKEHVQQLEKVFQILLQAGYVVSLKKSEIGQKTVEFLGFNITKEGRGLTDTFKTKLLNITPPKDLKQLQSILGLLNFARNFIPNFAELVQPLYNLIAPAKGKYIEWSEENTKQLNMVIEALNTASNLEERLPEQRLVIKVNTSPSAGYVRYYNETGKKPIMYLNYVFSKAELKFSMLEKLLTTMHKALIKAMDLAMGQEILVYSPIVSMTKIQKTPLPERKALPIRWITWMTYLEDPRIQFHYDKTLPELKHIPDVYTSSQSPVKHPSQYEGVFYTDGSAIKSPDPTKSNNAGMGIVHATYKPEYQVLNQWSIPLGNHTAQMAEIAAVEFACKKALKIPGPVLVITDSFYVAESANKELPYWKSNGFVNNKKKPLKHISKWKSIAECLSMKPDITIQHEKGISLQIPVFILKGNALADKLATQGSYVVN

SEQ ID NO: 18127 - protein, 751 aa, synthetic construct
MNPLQLLQPLPAEIKGTKLLAHWNSGATITCIPESFLEDEQPIKKTLIKTIHGEKQQNVYYVTFKVKGRKVEAEVIASPYEYILLSPTDVPWLTQQPLQLTILVPLQEYQEKILSKTALPEDQKQQLKTLFVKYDNLWQHWENQVGHRKIRPHNIATGDYPPRPQKQYPINPKAKPSIQIVIDDLLKQGVLTPQNSTMNTPVYPVPKPDGRWRMVLDYREVNKTIPLTAAQNQHSAGILATIVRQKYKTTLDLANGFWAHPITPESYWLTAFTWQGKQYCWTRLPQGFLNSPALFNADVVDLLKEIPNVQVYVDDIYLSHDDPKEHVQQLEKVFQILLQAGYVVSLKKSEIGQKTVEFLGFNITKEGRGLTDTFKTKLLNITPPKDLKQLQSILGKLNFARNFIPNFAELVQPLYNLIAPAKGKYIEWSEENTKQLNMVIEALNTASNLEERLPEQRLVIKVNTSPSAGYVRYYNETGKKPIMYLNYVFSKAELKFSMLEKLLTTMHKALIKAMDLAMGQEILVYSPIVSMTKIQKTPLPERKALPIRWITWMTYLEDPRIQFHYDKTLPELKHIPDVYTSSQSPVKHPSQYEGVFYTDGSAIKSPDPTKSNNAGMGIVHATYKPEYQVLNQWSIPLGNHTAQMAEIAAVEFACKKALKIPGPVLVITDSFYVAESANKELPYWKSNGFVNNKKKPLKHISKWKSIAECLSMKPDITIQHEKGISLQIPVFILKGNALADKLATQGSYVVN

SEQ ID NO: 18128 - protein, 662 aa, unidentified
VPWLTQQPLQLTILVPLQEYQEKILSKTALPEDQKQQLKTLFVKYDNLWQHWENQVGHRKIRPHNIATGDYPPRPQKQYPINPKAKPSIQIVIDDLLKQGVLTPQNSTMNTPVYPVPKPDGRWRMVLDYREVNKTIPLTAAQNQHSAGILATIVRQKYKTTLDLANGFWAHPITPESYWLTAFTWQGKQYCWTRLPQGFLNSPALFTADVVDLLKEIPNVQVYVDDIYLSHDDPKEHVQQLEKVFQILLQAGYVVSLKKSEIGQKTVEFLGFNITKEGRGLTDTFKTKLLNITPPKDLKQLQSILGLLNFARNFIPNFAELVQPLYNLIASAKGKYIEWSEENTKQLNMVIEALNTASNLEERLPEQRLVIKVNTSPSAGYVRYYNETGKKPIMYLNYVFSKAELKFSMLEKLLTTMHKALIKAMDLAMGQEILVYSPIVSMTKIQKTPLPERKALPIRWITWMTYLEDPRIQFHYDKTLPELKHIPDVYTSSQSPVKHPSQYEGVFYTDGSAIKSPDPTKSNNAGMGIVHATYKPEYQVLNQWSIPLGNHTAQMAEIAAVEFACKKALKIPGPVLVITDSFYVAESANKELPYWKSNGFVNNKKKPLKHISKWKSIAECLSMKPDITIQHEKGISLQIPVFILKGNALADKLATQGSYVVN

SEQ ID NO: 18129 - protein, 662 aa, synthetic construct
VPWLTQQPLQLTILVPLQEYQEKILSKTALPEDQKQQLKTLFVKYDNLWQHWENQVGHRKIRPHNIATGDYPPRPQKQYPINPKAKPSIQIVIDDLLKQGVLTPQNSTMNTPVYPVPKPDGRWRMVLDYREVNKTIPLTAAQNQHSAGILATIVRQKYKTTLDLANGFWAHPITPESYWLTAFTWQGKQYCWTRLPQGFLNSPALFNADVVDLLKEIPNVQVYVDDIYLSHDDPKEHVQQLEKVFQILLQAGYVVSLKKSEIGQKTVEFLGFNITKEGRGLTDTFKTKLLNITPPKDLKQLQSILGLLNFARNFIPNFAELVQPLYNLIAPAKGKYIEWSEENTKQLNMVIEALNTASNLEERLPEQRLVIKVNTSPSAGYVRYYNETGKKPIMYLNYVFSKAELKFSMLEKLLTTMHKALIKAMDLAMGQEILVYSPIVSMTKIQKTPLPERKALPIRWITWMTYLEDPRIQFHYDKTLPELKHIPDVYTSSQSPVKHPSQYEGVFYTDGSAIKSPDPTKSNNAGMGIVHATYKPEYQVLNQWSIPLGNHTAQMAEIAAVEFACKKALKIPGPVLVITDSFYVAESANKELPYWKSNGFVNNKKKPLKHISKWKSIAECLSMKPDITIQHEKGISLQIPVFILKGNALADKLATQGSYVVN

SEQ ID NO: 18130 - protein, 662 aa, synthetic construct
VPWLTQQPLQLTILVPLQEYQEKILSKTALPEDQKQQLKTLFVKYDNLWQHWENQVGHRKIRPHNIATGDYPPRPQKQYPINPKAKPSIQIVIDDLLKQGVLTPQNSTMNTPVYPVPKPDGRWRMVLDYREVNKTIPLTAAQNQHSAGILATIVRQKYKTTLDLANGFWAHPITPESYWLTAFTWQGKQYCWTRLPQGFLNSPALFNADVVDLLKEIPNVQVYVDDIYLSHDDPKEHVQQLEKVFQILLQAGYVVSLKKSEIGQKTVEFLGFNITKEGRGLTDTFKTKLLNITPPKDLKQLQSILGKLNFARNFIPNFAELVQPLYNLIAPAKGKYIEWSEENTKQLNMVIEALNTASNLEERLPEQRLVIKVNTSPSAGYVRYYNETGKKPIMYLNYVFSKAELKFSMLEKLLTTMHKALIKAMDLAMGQEILVYSPIVSMTKIQKTPLPERKALPIRWITWMTYLEDPRIQFHYDKTLPELKHIPDVYTSSQSPVKHPSQYEGVFYTDGSAIKSPDPTKSNNAGMGIVHATYKPEYQVLNQWSIPLGNHTAQMAEIAAVEFACKKALKIPGPVLVITDSFYVAESANKELPYWKSNGFVNNKKKPLKHISKWKSIAECLSMKPDITIQHEKGISLQIPVFILKGNALADKLATQGSYVVN

SEQ ID NO: 18131 - protein, 669 aa, Gibbon ape leukemia virus
VLNLEEEYRLHEKPVPSSIDPSWLQLFPTVWAERAGMGLANQVPPVVVELRSGASPVAVRQYPMSKEAREGIRPHIQKFLDLGVLVPCRSPWNTPLLPVKKPGTNDYRPVQDLREINKRVQDIHPTVPNPYNLLSSLPPSYTWYSVLDLKDAFFCLRLHPNSQPLFAFEWKDPEKGNTGQLTWTRLPQGFKNSPTLFDEALHRDLAPFRALNPQVVLLQYVDDLLVAAPTYEDCKKGTQKLLQELSKLGYRVSAKKAQLCQREVTYLGYLLKEGKRWLTPARKATVMKIPVPTTPRQVREFLGTAGFCRLWIPGFASLAAPLYPLTKESIPFIWTEEHQQAFDHIKKALLSAPALALPDLTKPFTLYIDERAGVARGVLTQTLGPWRRPVAYLSKKLDPVASGWPTCLKAVAAVALLLKDADKLTLGQNVTVIASHSLESIVRQPPDRWMTNARMTHYQSLLLNERVSFAPPAVLNPATLLPVESEATPVHRCSEILAEETGTRRDLEDQPLPGVPTWYTDGSSFITEGKRRAGAPIVDGKRTVWASSLPEGTSAQKAELVALTQALRLAEGKNINIYTDSRYAFATAHIHGAIYKQRGLLTSAGKDIKNKEEILALLEAIHLPRRVAIIHCPGHQRGSNPVATGNRRADEAAKQAALSTRVLAGTTKP

SEQ ID NO: 18132 - protein, 669 aa, synthetic construct
VLNLEEEYRLHEKPVPSSIDPSWLQLFPTVWAERAGMGLANQVPPVVVELRSGASPVAVRQYPMSKEAREGIRPHIQKFLDLGVLVPCRSPWNTPLLPVKKPGTNDYRPVQDLREINKRVQDIHPTVPNPYNLLSSLPPSYTWYSVLDLKDAFFCLRLHPNSQPLFAFEWKDPEKGNTGQLTWTRLPQGFKNSPTLFNEALHRDLAPFRALNPQVVLLQYVDDLLVAAPTYEDCKKGTQKLLQELSKLGYRVSAKKAQLCQREVTYLGYLLKEGKRWLTPARKATVMKIPVPTTPRQVREFLGTAGFCRLWIPGFASLAAPLYPLTKPSIPFIWTEEHQQAFDHIKKALLSAPALALPDLTKPFTLYIDERAGVARGVLTQTLGPWRRPVAYLSKKLDPVASGWPTCLKAVAAVALLLKDADKLTLGQNVTVIASHSLESIVRQPPDRWMTNARMTHYQSLLLNERVSFAPPAVLNPATLLPVESEATPVHRCSEILAEETGTRRDLEDQPLPGVPTWYTDGSSFITEGKRRAGAPIVDGKRTVWASSLPEGTSAQKAELVALTQALRLAEGKNINIYTDSRYAFATAHIHGAIYKQRGWLTSAGKDIKNKEEILALLEAIHLPRRVAIIHCPGHQRGSNPVATGNRRADEAAKQAALSTRVLAGTTKP

SEQ ID NO: 18133 - protein, 669 aa, synthetic construct
VLNLEEEYRLHEKPVPSSIDPSWLQLFPTVWAERAGMGLANQVPPVVVELRSGASPVAVRQYPMSKEAREGIRPHIQKFLDLGVLVPCRSPWNTPLLPVKKPGTNDYRPVQDLREINKRVQDIHPTVPNPYNLLSSLPPSYTWYSVLDLKDAFFCLRLHPNSQPLFAFEWKDPEKGNTGQLTWTRLPQGFKNSPTLFNEALHRDLAPFRALNPQVVLLQYVDDLLVAAPTYEDCKKGTQKLLQELSKLGYRVSAKKAQLCQREVTYLGYLLKEGKRWLTPARKATVMKIPVPTTPRQVREFLGKAGFCRLFIPGFASLAAPLYPLTKPSIPFIWTEEHQQAFDHIKKALLSAPALALPDLTKPFTLYIDERAGVARGVLTQTLGPWRRPVAYLSKKLDPVASGWPTCLKAVAAVALLLKDADKLTLGQNVTVIASHSLESIVRQPPDRWMTNARMTHYQSLLLNERVSFAPPAVLNPATLLPVESEATPVHRCSEILAEETGTRRDLEDQPLPGVPTWYTDGSSFITEGKRRAGAPIVDGKRTVWASSLPEGTSAQKAELVALTQALRLAEGKNINIYTDSRYAFATAHIHGAIYKQRGWLTSAGKDIKNKEEILALLEAIHLPRRVAIIHCPGHQRGSNPVATGNRRADEAAKQAALSTRVLAGTTKP

SEQ ID NO: 18134 - protein, 588 aa, unidentified
AVLGLEHLPRPPQISQFPLNPERLQALQHLVRKALEAGHIEPYTGPGNNPVFPVKKANGTWRFIHDLRATNSLTIDLSSSSPGPPDLSSLPTTLAHLQTIDLRDAFFQIPLPKQFQPYFAFTVPQQCNYGPGTRYAWKVLPQGFKNSPTLFEMQLAHILQPIRQAFPQCTILQYMDDILLASPSHEDLLLLSEATMASLISHGLPVSENKTQQTPGTIKFLGQIISPNHLTYDAVPTVPIRSRWALPELQALLGEIQWVSKGTPTLRQPLHSLYCALQRHTDPRDQIYLNPSQVQSLVQLRQALSQNCRSRLVQTLPLLGAIMLTLTGTTTVVFQSKEQWPLVWLHAPLPHTSQCPWGQLLASAVLLLDKYTLQSYGLLCQTIHHNISTQTFNQFIQTSDHPSVPILLHHSHRFKNLGAQTGELWNTFLKTAAPLAPVKALMPVFTLSPVIINTAPCLFSDGSTSRAAYILWDKQILSQRSFPLPPPHKSAQRAELLGLLHGLSSARSWRCLNIFLDSKYLYHYLRTLALGTFQGRSSQAPFQALLPRLLSRKVVYLHHVRSHTNLPDPISRLNALTDALLITPVLQL

SEQ ID NO: 18135 - protein, 588 aa, synthetic construct
AVLGLEHLPRPPQISQFPLNPERLQALQHLVRKALEAGHIEPYTGPGNNPVFPVKKANGTWRFIHDLRATNSLTIDLSSSSPGPPDLSSLPTTLAHLQTIDLRDAFFQIPLPKQFQPYFAFTVPQQCNYGPGTRYAWKVLPQGFKNSPTLFQMQLAHILQPIRQAFPQCTILQYMDDILLASPSHEDLLLLSEATMASLISHGLPVSENKTQQTPGTIKFLGQIISPNHLTYDAVPTVPIRSRWALPELQALLGEIQWVSKGTPTLRQPLHSLYCALQPHTDPRDQIYLNPSQVQSLVQLRQALSQNCRSRLVQTLPLLGAIMLTLTGTTTVVFQSKEQWPLVWLHAPLPHTSQCPWGQLLASAVLLLDKYTLQSYGLLCQTIHHNISTQTFNQFIQTSDHPSVPILLHHSHRFKNLGAQTGELWNTFLKTAAPLAPVKALMPVFTLSPVIINTAPCLFSDGSTSRAAYILWDKQILSQRSFPLPPPHKSAQRAELLGLLHGLSSARSWRCLNIFLDSKYLYHYLRTLALGTFQGRSSQAPFQALLPRLLSRKVVYLHHVRSHTNLPDPISRLNALTDALLITPVLQL

SEQ ID NO: 18136 - protein, 588 aa, synthetic construct
AVLGLEHLPRPPQISQFPLNPERLQALQHLVRKALEAGHIEPYTGPGNNPVFPVKKANGTWRFIHDLRATNSLTIDLSSSSPGPPDLSSPPTTLAHLQTIDLRDAFFQIPLPKQFQPYFAFTVPQQCNYGPGTRYAWKVLPQGFKNSPTLFQMQLAHILQPIRQAFPQCTILQYMDDILLASPSHEDLLLLSEATMASLISHGLPVSENKTQQTPGTIKFLGQIISPNHLTYDAVPTVPIRSRWALPELQALLGEIQWVSKGTPTLRQPLHSLYCALQPHTDPRDQIYLNPSQVQSLVQLRQALSQNCRSRLVQTLPLLGAIMLTLTGTTTVVFQSKEQWPLVWLHAPLPHTSQCPWGQLLASAVLLLDKYTLQSYGLLCQTIHHNISTQTFNQFIQTSDHPSVPILLHHSHRFKNLGAQTGELWNTFLKTAAPLAPVKALMPVFTLSPVIINTAPCLFSDGSTSRAAYILWDKQILSQRSFPLPPPHKSAQRAELLGLLHGLSSARSWRCLNIFLDSKYLYHYLRTLALGTFQGRSSQAPFQALLPRLLSRKVVYLHHVRSHTNLPDPISRLNALTDALLITPVLQL

SEQ ID NO: 18137 - protein, 588 aa, unidentified
AVLGLEHLPRPPEISQFPLNPERLQALQHLVRKALEAGHIEPYTGPGNNPVFPVKKANGTWRFIHDLRATNSLTIDLSSSSPGPPDLSSLPTTLAHLQTIDLKDAFFQIPLPKQFQPYFAFTVPQQCNYGPGTRYAWRVLPQGFKNSPTLFEMQLAHILQPIRQAFPQCTILQYMDDILLASPSHADLQLLSEATMASLISHGLPVSENKTQQTPGTIKFLGQIISPNHLTYDAVPKVPIRSRWALPELQALLGEIQWVSKGTPTLRQPLHSLYCALQRHTDPRDQIYLNPSQVQSLVQLRQALSQNCRSRLVQTLPLLGAIMLTLTGTTTVVFQSKQQWPLVWLHAPLPHTSQCPWGQLLASAVLLLDKYTLQSYGLLCQTIHHNISTQTFNQFIQTSDHPSVPILLHHSHRFKNLGAQTGELWNTFLKTTAPLAPVKALMPVFTLSPVIINTAPCLFSDGSTSQAAYILWDKHILSQRSFPLPPPHKSAQRAELLGLLHGLSSARSWRCLNIFLDSKYLYHYLRTLALGTFQGRSSQAPFQALLPRLLSRKVVYLHHVRSHTNLPDPISRLNALTDALLITPVLQL

SEQ ID NO: 18138 - protein, 588 aa, synthetic construct
AVLGLEHLPRPPEISQFPLNPERLQALQHLVRKALEAGHIEPYTGPGNNPVFPVKKANGTWRFIHDLRATNSLTIDLSSSSPGPPDLSSLPTTLAHLQTIDLKDAFFQIPLPKQFQPYFAFTVPQQCNYGPGTRYAWRVLPQGFKNSPTLFQMQLAHILQPIRQAFPQCTILQYMDDILLASPSHADLQLLSEATMASLISHGLPVSENKTQQTPGTIKFLGQIISPNHLTYDAVPKVPIRSRWALPELQALLGEIQWVSKGTPTLRQPLHSLYCALQPHTDPRDQIYLNPSQVQSLVQLRQALSQNCRSRLVQTLPLLGAIMLTLTGTTTVVFQSKQQWPLVWLHAPLPHTSQCPWGQLLASAVLLLDKYTLQSYGLLCQTIHHNISTQTFNQFIQTSDHPSVPILLHHSHRFKNLGAQTGELWNTFLKTTAPLAPVKALMPVFTLSPVIINTAPCLFSDGSTSQAAYILWDKHILSQRSFPLPPPHKSAQRAELLGLLHGLSSARSWRCLNIFLDSKYLYHYLRTLALGTFQGRSSQAPFQALLPRLLSRKVVYLHHVRSHTNLPDPISRLNALTDALLITPVLQL

SEQ ID NO: 18139 - protein, 583 aa, unidentified
GLEHLPRPPEISQFPLNPERLQALQHLVRKALEAGHIEPYTGPGNNPVFPVKKANGTWRFIHDLRATNSLTVDLSSSSPGPPDLSSLPTTLAHLQTIDLKDAFFQIPLPKQFQPYFAFTVPQQCNYGPGTRYAWKVLPQGFKNSPTLFEMQLASILQPIRQAFPQCVILQYMDDILLASPSPEDLQQLSEATMASLISHGLPVSQDKTQQTPGTIKFLGQIISPNHITYDAVPTVPIRSRWALPELQALLGEIQWVSKGTPTLRQPLHSLYCALQGHTDPRDQIYLNPSQVQSLMQLQQALSQNCRSRLAQTLPLLGAIMLTLTGTTTVVFQSKQQWPLVWLHAPLPHTSQCPWGQLLASAVLLLDKYTLQSYGLLCQTIHHNISIQTFNQFIQTSDHPSVPILLHHSHRFKNLGAQTGELWNTFLKTAAPLAPVKALTPVFTLSPIIINTAPCLFSDGSTSQAAYILWDKHILSQRSFPLPPPHKSAQQAELLGLLHGLSSARSWHCLNIFLDSKYLYHYLRTLALGTFQGKSSQAPFQALLPRLLAHKVIYLHHVRSHTNLPDPISKLNALTDALLITPIL

SEQ ID NO: 18140 - protein, 583 aa, synthetic construct
GLEHLPRPPEISQFPLNPERLQALQHLVRKALEAGHIEPYTGPGNNPVFPVKKANGTWRFIHDLRATNSLTVDLSSSSPGPPDLSSLPTTLAHLQTIDLKDAFFQIPLPKQFQPYFAFTVPQQCNYGPGTRYAWKVLPQGFKNSPTLFQMQLASILQPIRQAFPQCVILQYMDDILLASPSPEDLQQLSEATMASLISHGLPVSQDKTQQTPGTIKFLGQIISPNHITYDAVPTVPIRSRWALPELQALLGEIQWVSKGTPTLRQPLHSLYCALQGHTDPRDQIYLNPSQVQSLMQLQQALSQNCRSRLAQTLPLLGAIMLTLTGTTTVVFQSKQQWPLVWLHAPLPHTSQCPWGQLLASAVLLLDKYTLQSYGLLCQTIHHNISIQTFNQFIQTSDHPSVPILLHHSHRFKNLGAQTGELWNTFLKTAAPLAPVKALTPVFTLSPIIINTAPCLFSDGSTSQAAYILWDKHILSQRSFPLPPPHKSAQQAELLGLLHGLSSARSWHCLNIFLDSKYLYHYLRTLAWGTFQGKSSQAPFQALLPRLLAHKVIYLHHVRSHTNLPDPISKLNALTDALLITPIL

SEQ ID NO: 18141 - protein, 583 aa, synthetic construct
GLEHLPRPPEISQFPLNPERLQALQHLVRKALEAGHIEPYTGPGNNPVFPVKKANGTWRFIHDLRATNSLTVDLSSSSPGPPDLSSPPTTLAHLQTIDLKDAFFQIPLPKQFQPYFAFTVPQQCNYGPGTRYAWKVLPQGFKNSPTLFQMQLASILQPIRQAFPQCVILQYMDDILLASPSPEDLQQLSEATMASLISHGLPVSQDKTQQTPGTIKFLGQIISPNHITYDAVPTVPIRSRWALPELQALLGEIQWVSKGTPTLRQPLHSLYCALQGHTDPRDQIYLNPSQVQSLMQLQQALSQNCRSRLAQTLPLLGAIMLTLTGTTTVVFQSKQQWPLVWLHAPLPHTSQCPWGQLLASAVLLLDKYTLQSYGLLCQTIHHNISIQTFNQFIQTSDHPSVPILLHHSHRFKNLGAQTGELWNTFLKTAAPLAPVKALTPVFTLSPIIINTAPCLFSDGSTSQAAYILWDKHILSQRSFPLPPPHKSAQQAELLGLLHGLSSARSWHCLNIFLDSKYLYHYLRTLAWGTFQGKSSQAPFQALLPRLLAHKVIYLHHVRSHTNLPDPISKLNALTDALLITPIL

SEQ ID NO: 18142 - protein, 584 aa, unidentified
GLEHLPPPPEVSQFPLNPERLQALTDLVSRALEAKHIEPYQGPGNNPIFPVKKPNGKWRFIHDLRATNSVTRDLASPSPGPPDLTSLPQGLPHLRTIDLTDAFFQIPLPTIFQPYFAFTLPQPNNYGPGTRYSWRVLPQGFKNSPTLFEQQLSHILTPVRKTFPNSLIIQYMDDILLASPAPGELAALTDKVTNALTKEGLPLSPEKTQATPGPIHFLGQVISQDCITYETLPSINVKSTWSLAELQSMLGELQWVSKGTPVLRSSLHQLYLALRGHRDPRDTIKLTSIQVQALRTIQKALTLNCRSRLVNQLPILALIMLRPTGTTAVLFQTKQKWPLVWLHTPHPATSLRPWGQLLANAVIILDKYSLQHYGQVCKSFHHNISNQALTYYLHTSDQSSVAILLQHSHRFHNLGAQPSGPWRSLLQMPQIFQNIDVLRPPFTISPVVINHAPCLFSDGSASKAAFIIWDRQVIHQQVLSLPSTCSAQAGELFGLLAGLQKSQPWVALNIFLDSKFLIGHLRRMALGAFPGPSTQCELHTQLLPLLQGKTVYVHHVRSHTLLQDPISRLNEATDALMLAPLLPL

SEQ ID NO: 18143 - protein, 584 aa, synthetic construct
GLEHLPPPPEVSQFPLNPERLQALTDLVSRALEAKHIEPYQGPGNNPIFPVKKPNGKWRFIHDLRATNSVTRDLASPSPGPPDLTSLPQGLPHLRTIDLTDAFFQIPLPTIFQPYFAFTLPQPNNYGPGTRYSWRVLPQGFKNSPTLFQQQLSHILTPVRKTFPNSLIIQYMDDILLASPAPGELAALTDKVTNALTKEGLPLSPEKTQATPGPIHFLGQVISQDCITYETLPSINVKSTWSLAELQSMLGELQWVSKGTPVLRSSLHQLYLALRGHRDPRDTIKLTSIQVQALRTIQKALTLNCRSRLVNQLPILALIMLRPTGTTAVLFQTKQKWPLVWLHTPHPATSLRPWGQLLANAVIILDKYSLQHYGQVCKSFHHNISNQALTYYLHTSDQSSVAILLQHSHRFHNLGAQPSGPWRSLLQMPQIFQNIDVLRPPFTISPVVINHAPCLFSDGSASKAAFIIWDRQVIHQQVLSLPSTCSAQAGELFGLLAGLQKSQPWVALNIFLDSKFLIGHLRRMAWGAFPGPSTQCELHTQLLPLLQGKTVYVHHVRSHTLLQDPISRLNEATDALMLAPLLPL

SEQ ID NO: 18144 - protein, 584 aa, synthetic construct
GLEHLPPPPEVSQFPLNPERLQALTDLVSRALEAKHIEPYQGPGNNPIFPVKKPNGKWRFIHDLRATNSVTRDLASPSPGPPDLTSPPQGLPHLRTIDLTDAFFQIPLPTIFQPYFAFTLPQPNNYGPGTRYSWRVLPQGFKNSPTLFQQQLSHILTPVRKTFPNSLIIQYMDDILLASPAPGELAALTDKVTNALTKEGLPLSPEKTQATPGPIHFLGQVISQDCITYETLPSINVKSTWSLAELQSMLGELQWVSKGTPVLRSSLHQLYLALRGHRDPRDTIKLTSIQVQALRTIQKALTLNCRSRLVNQLPILALIMLRPTGTTAVLFQTKQKWPLVWLHTPHPATSLRPWGQLLANAVIILDKYSLQHYGQVCKSFHHNISNQALTYYLHTSDQSSVAILLQHSHRFHNLGAQPSGPWRSLLQMPQIFQNIDVLRPPFTISPVVINHAPCLFSDGSASKAAFIIWDRQVIHQQVLSLPSTCSAQAGELFGLLAGLQKSQPWVALNIFLDSKFLIGHLRRMAWGAFPGPSTQCELHTQLLPLLQGKTVYVHHVRSHTLLQDPISRLNEATDALMLAPLLPL

SEQ ID NO: 18145 - protein, 584 aa, unidentified
GLEHLPPPPEVSQFPLNPERLQALTDLVSRALEAKHIEPYQGPGNNPIFPVKKPNGKWRFIHDLRATNSLTRDLASPSPGPPDLTSLPQDLPHLRTIDLTDAFFQIPLPAVFQPYFAFTLPQPNNHGPGTRYSWRVLPQGFKNSPTLFEQQLSHILAPVRKAFPNSLIIQYMDDILLASPALRELTALTDKVTNALTKEGLPMSLEKTQATPGSIHFLGQVISPDCITYETLPSIHVKSIWSLAELQSMLGELQWVSKGTPVLRSSLHQLYLALRGHRDPRDTIELTSTQVQALKTIQKALALNCRSRLVSQLPILALIILRPTGTTAVLFQTKQKWPLVWLHTPHPATSLRPWGQLLANAIITLDKYSLQHYGQICKSFHHNISNQALTYYLHTSDQSSVAILLQHSHRFHNLGAQPSGPWRSLLQVPQIFQNIDVLRPPFIISPVVIDHAPCLFSDGATSKAAFILWDKQVIHQQVLPLPSTCSAQAGELFGLLAGLQKSKPWPALNIFLDSKFLIGHLRRMALGAFLGPSTQCDLHARLFPLLQGKTVYVHHVRSHTLLQDPISRLNEATDALMLAPLLPL

SEQ ID NO: 18146 - protein, 584 aa, synthetic construct
GLEHLPPPPEVSQFPLNPERLQALTDLVSRALEAKHIEPYQGPGNNPIFPVKKPNGKWRFIHDLRATNSLTRDLASPSPGPPDLTSLPQDLPHLRTIDLTDAFFQIPLPAVFQPYFAFTLPQPNNHGPGTRYSWRVLPQGFKNSPTLFQQQLSHILAPVRKAFPNSLIIQYMDDILLASPALRELTALTDKVTNALTKEGLPMSLEKTQATPGSIHFLGQVISPDCITYETLPSIHVKSIWSLAELQSMLGELQWVSKGTPVLRSSLHQLYLALRGHRDPRDTIELTSTQVQALKTIQKALALNCRSRLVSQLPILALIILRPTGTTAVLFQTKQKWPLVWLHTPHPATSLRPWGQLLANAIITLDKYSLQHYGQICKSFHHNISNQALTYYLHTSDQSSVAILLQHSHRFHNLGAQPSGPWRSLLQVPQIFQNIDVLRPPFIISPVVIDHAPCLFSDGATSKAAFILWDKQVIHQQVLPLPSTCSAQAGELFGLLAGLQKSKPWPALNIFLDSKFLIGHLRRMAWGAFLGPSTQCDLHARLFPLLQGKTVYVHHVRSHTLLQDPISRLNEATDALMLAPLLPL

SEQ ID NO: 18147 - protein, 584 aa, synthetic construct
GLEHLPPPPEVSQFPLNPERLQALTDLVSRALEAKHIEPYQGPGNNPIFPVKKPNGKWRFIHDLRATNSLTRDLASPSPGPPDLTSPPQDLPHLRTIDLTDAFFQIPLPAVFQPYFAFTLPQPNNHGPGTRYSWRVLPQGFKNSPTLFQQQLSHILAPVRKAFPNSLIIQYMDDILLASPALRELTALTDKVTNALTKEGLPMSLEKTQATPGSIHFLGQVISPDCITYETLPSIHVKSIWSLAELQSMLGELQWVSKGTPVLRSSLHQLYLALRGHRDPRDTIELTSTQVQALKTIQKALALNCRSRLVSQLPILALIILRPTGTTAVLFQTKQKWPLVWLHTPHPATSLRPWGQLLANAIITLDKYSLQHYGQICKSFHHNISNQALTYYLHTSDQSSVAILLQHSHRFHNLGAQPSGPWRSLLQVPQIFQNIDVLRPPFIISPVVIDHAPCLFSDGATSKAAFILWDKQVIHQQVLPLPSTCSAQAGELFGLLAGLQKSKPWPALNIFLDSKFLIGHLRRMAWGAFLGPSTQCDLHARLFPLLQGKTVYVHHVRSHTLLQDPISRLNEATDALMLAPLLPL

SEQ ID NO: 18148 - protein, 584 aa, synthetic construct
HLPPPPQVDQFPLNLPERLQALNDLVSKALEAGHIEPYSGPGNNPVFPVKKPNGKWRFIHDLRATNAITTTLTSPSPGPPDLTSLPTALPHLQTIDLTDAFFQIPLPKQYQPYFAFTIPQPCNYGPGTRYAWTVLPQGFKNSPTLFQQQLAAVLNPMRKMFPTSTIVQYMDDILLASPTNEELQQLSQLTLQALTTHGLPISQEKTQQTPGQIRFLGQVISPNHITYESTPTIPIKSQWTLTELQVILGEIQWVSKGTPILRKHLQSLYSALHPYRDPRACITLTPQQLHALHAIQQALQHNCRGRLNPALPLLGLISLSTSGTTSVIFQPKQNWPLAWLHTPHPPTSLCPWGHLLACTILTLDKYTLQHYGQLCQSFHHNMSKQALCDFLRNSPHPSVGILIHHMGRFHNLGSQPSGPWKTLLHLPTLLQEPRLLRPIFTLSPVVLDTAPCLFSDGSPQKAAYVLWDQTILQQDITPLPSHETHSAQKGELLALICGLRAAKPWPSLNIFLDSKYLIKYLHSLAIGAFLGTSAHQTLQAALPPLLQGKTIYLHHVRSHTNLPDPISTFNEYTDSLILAPLVPL

SEQ ID NO: 18149 - protein, 581 aa, Jaagsiekte sheep retrovirus
PLGTSDSPVTHADPIDWKSEEPVWVDQWPLTQEKLSAAQQLVQEQLRLGHIEPSTSAWNSPIFVIKKKSGKWRLLQDLRKVNETMMHMGALQPGLPTPSAIPDKSYIIVIDLKDCFYTIPLAPQDCKRFAFSLPSVNFKEPMQRYQWRVLPQGMTNSPTLCQKFVATAIAPVRQRFPQLYLVHYMDDILLAHTDEHLLYQAFSILKQHLSLNGLVIADEKIQTHFPYNYLGFSLYPRVYNTQLVKLQTDHLKTLNDFQKLLGDINWIRPYLKLPTYTLQPLFDILKGDSDPASPRTLSLEGRTALQSIEEAIRQQQITYCDYQRSWGLYILPTPRAPTGVLYQDKPLRWIYLSATPTKHLLPYYELVAKIIAKGRHEAIQYFGMEPPFICVPYALEQQDWLFQFSDNWSIAFANYPGQITHHYPSDKLLQFASSHAFIFPKIVRRQPIPEATLIFTDGSSNGTAALIINHQTYYAQTSFSSAQVVELFAVHQALLTVPTSFNLFTDSSYVVGALQMIETVPIIGTTSPEVLNLFTLIQQVLHCRQHPCFFGHIRAHSTLPGALVQGNHTADVLTKQVFFQS

SEQ ID NO: 18150 - protein, 581 aa, synthetic construct
PLGTSDSPVTHADPIDWKSEEPVWVDQWPLTQEKLSAAQQLVQEQLRLGHIEPSTSAWNSPIFVIKKKSGKWRLLQDLRKVNETMMHMGALQPGLPTPSPIPDKSYIIVIDLKDCFYTIPLAPQDCKRFAFSLPSVNFKEPMQRYQWRVLPQGMTNSPTLCQKFVATAIAPVRQRFPQLYLVHYMDDILLAHTDEHLLYQAFSILKQHLSLNGLVIADEKIQTHFPYNYLGFSLYPRVYNTQLVKLQTDHLKTLNDFQKLLGDINWIRPYLKLPTYTLQPLFDILKGDSDPASPRTLSLEGRTALQSIEEAIRQQQITYCDYQRSWGLYILPTPRAPTGVLYQDKPLRWIYLSATPTKHLLPYYELVAKIIAKGRHEAIQYFGMEPPFICVPYALEQQDWLFQFSDNWSIAFANYPGQITHHYPSDKLLQFASSHAFIFPKIVRRQPIPEATLIFTDGSSNGTAALIINHQTYYAQTSFSSAQVVELFAVHQALLTVPTSFNLFTDSSYVVGALQMIETVPIIGTTSPEVLNLFTLIQQVLHCRQHPCFFGHIRAHSTLPGALVQGNHTADVLTKQVFFQS

SEQ ID NO: 18151 - protein, 793 aa, Koala retrovirus
TLGDQGSRGSDPLPEPRVTLTVEGIPTEFLVNTGAEHSVLTKPMGKMGSKRTVVAGATGSKVYPWTTKRLLKIGQKQVTHSFLVIPECPAPLLGRDLLTKLKAQIQFSTEGPQVTWEDRPAMCLVLNLEEEYRLHEKPVPPSIDPSWLQLFPMVWAEKAGMGLANQVPPVVVELKSDASPVAVRQYPMSKEAREGIRPHIQRFLDLGILVPCQSPWNTPLLPVKKPGTNDYRPVQDLREVNKRVQDIHPTVPNPYNLLSSLPPSHTWYSVLDLKDAFFCLKLHPNSQPLFAFEWRDPEKGNTGQLTWTRLPQGFKNSPTLFDEALHRDLASFRALNPQVVMLQYVDDLLVAAPTYRDCKEGTRRLLQELSKLGYRVSAKKAQLCREEVTYLGYLLKGGKRWLTPARKATVMKIPTPTTPRQVREFLGTAGFCRLWIPGFASLAAPLYPLTREKVPFTWTEAHQEAFGRIKEALLSAPALALPDLTKPFALYVDEKEGVARGVLTQTLGPWRRPVAYLSKKLDPVASGWPTCLKAIAAVALLLKDADKLTLGQNVLVIAPHNLESIVRQPPDRWMTNARMTHYQSLLLNERVSFAPPAILNPATLLPVESDDTPIHICSEILAEETGTRPDLRDQPLPGVPAWYTDGSSFIMDGRRQAGAAIVDNKRTVWASNLPEGTSAQKAELIALTQALRLAEGKSINIYTDSRYAFATAHVHGAIYKQRGLLTSAGKDIKNKEEILALLEAIHLPKRVAIIHCPGHQRGTDPVATGNRKADEAAKQAAQSTRILTETTKN

SEQ ID NO: 18152 - protein, 793 aa, synthetic construct
TLGDQGSRGSDPLPEPRVTLTVEGIPTEFLVNTGAEHSVLTKPMGKMGSKRTVVAGATGSKVYPWTTKRLLKIGQKQVTHSFLVIPECPAPLLGRDLLTKLKAQIQFSTEGPQVTWEDRPAMCLVLNLEEEYRLHEKPVPPSIDPSWLQLFPMVWAEKAGMGLANQVPPVVVELKSDASPVAVRQYPMSKEAREGIRPHIQRFLDLGILVPCQSPWNTPLLPVKKPGTNDYRPVQDLREVNKRVQDIHPTVPNPYNLLSSLPPSHTWYSVLDLKDAFFCLKLHPNSQPLFAFEWRDPEKGNTGQLTWTRLPQGFKNSPTLFNEALHRDLASFRALNPQVVMLQYVDDLLVAAPTYRDCKEGTRRLLQELSKLGYRVSAKKAQLCREEVTYLGYLLKGGKRWLTPARKATVMKIPTPTTPRQVREFLGTAGFCRLWIPGFASLAAPLYPLTRPKVPFTWTEAHQEAFGRIKEALLSAPALALPDLTKPFALYVDEKEGVARGVLTQTLGPWRRPVAYLSKKLDPVASGWPTCLKAIAAVALLLKDADKLTLGQNVLVIAPHNLESIVRQPPDRWMTNARMTHYQSLLLNERVSFAPPAILNPATLLPVESDDTPIHICSEILAEETGTRPDLRDQPLPGVPAWYTDGSSFIMDGRRQAGAAIVDNKRTVWASNLPEGTSAQKAELIALTQALRLAEGKSINIYTDSRYAFATAHVHGAIYKQRGWLTSAGKDIKNKEEILALLEAIHLPKRVAIIHCPGHQRGTDPVATGNRKADEAAKQAAQSTRILTETTKN

SEQ ID NO: 18153 - protein, 793 aa, synthetic construct
TLGDQGSRGSDPLPEPRVTLTVEGIPTEFLVNTGAEHSVLTKPMGKMGSKRTVVAGATGSKVYPWTTKRLLKIGQKQVTHSFLVIPECPAPLLGRDLLTKLKAQIQFSTEGPQVTWEDRPAMCLVLNLEEEYRLHEKPVPPSIDPSWLQLFPMVWAEKAGMGLANQVPPVVVELKSDASPVAVRQYPMSKEAREGIRPHIQRFLDLGILVPCQSPWNTPLLPVKKPGTNDYRPVQDLREVNKRVQDIHPTVPNPYNLLSSLPPSHTWYSVLDLKDAFFCLKLHPNSQPLFAFEWRDPEKGNTGQLTWTRLPQGFKNSPTLFNEALHRDLASFRALNPQVVMLQYVDDLLVAAPTYRDCKEGTRRLLQELSKLGYRVSAKKAQLCREEVTYLGYLLKGGKRWLTPARKATVMKIPTPTTPRQVREFLGKAGFCRLFIPGFASLAAPLYPLTRPKVPFTWTEAHQEAFGRIKEALLSAPALALPDLTKPFALYVDEKEGVARGVLTQTLGPWRRPVAYLSKKLDPVASGWPTCLKAIAAVALLLKDADKLTLGQNVLVIAPHNLESIVRQPPDRWMTNARMTHYQSLLLNERVSFAPPAILNPATLLPVESDDTPIHICSEILAEETGTRPDLRDQPLPGVPAWYTDGSSFIMDGRRQAGAAIVDNKRTVWASNLPEGTSAQKAELIALTQALRLAEGKSINIYTDSRYAFATAHVHGAIYKQRGWLTSAGKDIKNKEEILALLEAIHLPKRVAIIHCPGHQRGTDPVATGNRKADEAAKQAAQSTRILTETTKN

SEQ ID NO: 18154 - protein, 702 aa, Koala retrovirus
LLGRDLLTKLKAQIQFSTEGPQVTWEDRPAMCLVLNLEEEYRLHEKPVPPSIDPSWLQLFPMVWAEKAGMGLANQVPPVVVELKSDASPVAVRQYPMSKEAREGIRPHIQRFLDLGILVPCQSPWNTPLLPVKKPGTNDYRPVQDLREVNKRVQDIHPTVPNPYNLLSSLPPSHTWYSVLDLKDAFFCLKLHPNSQPLFAFEWRDPEKGNTGQLTWTRLPQGFKNSPTLFDEALHRDLASFRALNPQVVMLQYVDDLLVAAPTYRDCKEGTRRLLQELSKLGYRVSAKKAQLCREEVTYLGYLLKGGKRWLTPARKATVMKIPTPTTPRQVREFLGTAGFCRLWIPGFASLAAPLYPLTREKVPFTWTEAHQEAFGRIKEALLSAPALALPDLTKPFALYVDEKEGVARGVLTQTLGPWRRPVAYLSKKLDPVASGWPTCLKAIAAVALLLKDADKLTLGQNVLVIAPHNLESIVRQPPDRWMTNARMTHYQSLLLNERVSFAPPAILNPATLLPVESDDTPIHICSEILAEETGTRPDLRDQPLPGVPAWYTDGSSFIMDGRRQAGAAIVDNKRTVWASNLPEGTSAQKAELIALTQALRLAEGKSINIYTDSRYAFATAHVHGAIYKQRGLLTSAGKDIKNKEEILALLEAIHLPKRVAIIHCPGHQRGTDPVATGNRKADEAAKQAAQSTRILTETTKN

SEQ ID NO: 18155 - protein, 702 aa, synthetic construct
LLGRDLLTKLKAQIQFSTEGPQVTWEDRPAMCLVLNLEEEYRLHEKPVPPSIDPSWLQLFPMVWAEKAGMGLANQVPPVVVELKSDASPVAVRQYPMSKEAREGIRPHIQRFLDLGILVPCQSPWNTPLLPVKKPGTNDYRPVQDLREVNKRVQDIHPTVPNPYNLLSSLPPSHTWYSVLDLKDAFFCLKLHPNSQPLFAFEWRDPEKGNTGQLTWTRLPQGFKNSPTLFNEALHRDLASFRALNPQVVMLQYVDDLLVAAPTYRDCKEGTRRLLQELSKLGYRVSAKKAQLCREEVTYLGYLLKGGKRWLTPARKATVMKIPTPTTPRQVREFLGTAGFCRLWIPGFASLAAPLYPLTRPKVPFTWTEAHQEAFGRIKEALLSAPALALPDLTKPFALYVDEKEGVARGVLTQTLGPWRRPVAYLSKKLDPVASGWPTCLKAIAAVALLLKDADKLTLGQNVLVIAPHNLESIVRQPPDRWMTNARMTHYQSLLLNERVSFAPPAILNPATLLPVESDDTPIHICSEILAEETGTRPDLRDQPLPGVPAWYTDGSSFIMDGRRQAGAAIVDNKRTVWASNLPEGTSAQKAELIALTQALRLAEGKSINIYTDSRYAFATAHVHGAIYKQRGWLTSAGKDIKNKEEILALLEAIHLPKRVAIIHCPGHQRGTDPVATGNRKADEAAKQAAQSTRILTETTKN

SEQ ID NO: 18156 - protein, 702 aa, synthetic construct
LLGRDLLTKLKAQIQFSTEGPQVTWEDRPAMCLVLNLEEEYRLHEKPVPPSIDPSWLQLFPMVWAEKAGMGLANQVPPVVVELKSDASPVAVRQYPMSKEAREGIRPHIQRFLDLGILVPCQSPWNTPLLPVKKPGTNDYRPVQDLREVNKRVQDIHPTVPNPYNLLSSLPPSHTWYSVLDLKDAFFCLKLHPNSQPLFAFEWRDPEKGNTGQLTWTRLPQGFKNSPTLFNEALHRDLASFRALNPQVVMLQYVDDLLVAAPTYRDCKEGTRRLLQELSKLGYRVSAKKAQLCREEVTYLGYLLKGGKRWLTPARKATVMKIPTPTTPRQVREFLGKAGFCRLFIPGFASLAAPLYPLTRPKVPFTWTEAHQEAFGRIKEALLSAPALALPDLTKPFALYVDEKEGVARGVLTQTLGPWRRPVAYLSKKLDPVASGWPTCLKAIAAVALLLKDADKLTLGQNVLVIAPHNLESIVRQPPDRWMTNARMTHYQSLLLNERVSFAPPAILNPATLLPVESDDTPIHICSEILAEETGTRPDLRDQPLPGVPAWYTDGSSFIMDGRRQAGAAIVDNKRTVWASNLPEGTSAQKAELIALTQALRLAEGKSINIYTDSRYAFATAHVHGAIYKQRGWLTSAGKDIKNKEEILALLEAIHLPKRVAIIHCPGHQRGTDPVATGNRKADEAAKQAAQSTRILTETTKN

SEQ ID NO: 18157 - protein, 671 aa, unidentified
TLNLEDEYRLYETSAEPEVSPGSTWLSDFPQAWAETGGMGLAVRQAPLIIPLKATSTPVSIKQYPMSQEAKLGIKPHIQRLLDQGILVPCQSPWNTPLLPVKKPGTNDYRPVQDLREVNKRVEDIHPTVPNPYNLLSGLPPSHRWYTVLDLKDAFFCLRLHPTSQPLFAFEWRDPGMGISGQLTWTRLPQGFKNSPTLFDEALHRDLADFRIQHPDLILLQYVDDILLAATSELDCQQGTRALLLTLGNLGYRASAKKAQLCQKQVKYLGYLLKEGQRWLTEARKETVMGQPTPKTPRQLREFLGTAGFCRLWIPGFAEMAAPLYPLTKTGTLFNWGPDQQKAYQEIKQALLTAPALGLPDLTKPFELFVDEKQGYAKGVLTQKLGPWRRPVAYLSKKLDPVAAGWPPCLRMVAAIAVLRKDAGKLTMGQPLVILAPHAVEALVKQPPDRWLSNARMTHYQAMLLDTDRVQFGPVVALNPATLLPLPEEGAPHDCLEILAETHGTRPDLTDQPIPDADHTWYTDGSSFLQEGQRKAGAAVTTETEVIWARALPAGTSAQRAELIALTQALKMAEGKRLNVYTDSRYAFATAHIHGEIYRRRGLLTSEGREIKNKSEILALLKALFLPKRLSIIHCLGHQKGDSAEARGNRLADQAAREAAIKTPPDTSTLL

SEQ ID NO: 18158 - protein, 671 aa, synthetic construct
TLNLEDEYRLYETSAEPEVSPGSTWLSDFPQAWAETGGMGLAVRQAPLIIPLKATSTPVSIKQYPMSQEAKLGIKPHIQRLLDQGILVPCQSPWNTPLLPVKKPGTNDYRPVQDLREVNKRVEDIHPTVPNPYNLLSGLPPSHRWYTVLDLKDAFFCLRLHPTSQPLFAFEWRDPGMGISGQLTWTRLPQGFKNSPTLFNEALHRDLADFRIQHPDLILLQYVDDILLAATSELDCQQGTRALLLTLGNLGYRASAKKAQLCQKQVKYLGYLLKEGQRWLTEARKETVMGQPTPKTPRQLREFLGTAGFCRLWIPGFAEMAAPLYPLTKPGTLFNWGPDQQKAYQEIKQALLTAPALGLPDLTKPFELFVDEKQGYAKGVLTQKLGPWRRPVAYLSKKLDPVAAGWPPCLRMVAAIAVLRKDAGKLTMGQPLVILAPHAVEALVKQPPDRWLSNARMTHYQAMLLDTDRVQFGPVVALNPATLLPLPEEGAPHDCLEILAETHGTRPDLTDQPIPDADHTWYTDGSSFLQEGQRKAGAAVTTETEVIWARALPAGTSAQRAELIALTQALKMAEGKRLNVYTDSRYAFATAHIHGEIYRRRGWLTSEGREIKNKSEILALLKALFLPKRLSIIHCLGHQKGDSAEARGNRLADQAAREAAIKTPPDTSTLL

SEQ ID NO: 18159 - protein, 671 aa, synthetic construct
TLNLEDEYRLYETSAEPEVSPGSTWLSDFPQAWAETGGMGLAVRQAPLIIPLKATSTPVSIKQYPMSQEAKLGIKPHIQRLLDQGILVPCQSPWNTPLLPVKKPGTNDYRPVQDLREVNKRVEDIHPTVPNPYNLLSGLPPSHRWYTVLDLKDAFFCLRLHPTSQPLFAFEWRDPGMGISGQLTWTRLPQGFKNSPTLFNEALHRDLADFRIQHPDLILLQYVDDILLAATSELDCQQGTRALLLTLGNLGYRASAKKAQLCQKQVKYLGYLLKEGQRWLTEARKETVMGQPTPKTPRQLREFLGKAGFCRLFIPGFAEMAAPLYPLTKPGTLFNWGPDQQKAYQEIKQALLTAPALGLPDLTKPFELFVDEKQGYAKGVLTQKLGPWRRPVAYLSKKLDPVAAGWPPCLRMVAAIAVLRKDAGKLTMGQPLVILAPHAVEALVKQPPDRWLSNARMTHYQAMLLDTDRVQFGPVVALNPATLLPLPEEGAPHDCLEILAETHGTRPDLTDQPIPDADHTWYTDGSSFLQEGQRKAGAAVTTETEVIWARALPAGTSAQRAELIALTQALKMAEGKRLNVYTDSRYAFATAHIHGEIYRRRGWLTSEGREIKNKSEILALLKALFLPKRLSIIHCLGHQKGDSAEARGNRLADQAAREAAIKTPPDTSTLL

SEQ ID NO: 18160 - protein, 671 aa, Murine leukemia virus
TLGIEDEYRLHETSTEPDVSLGSTWLSDFPQAWAETGGMGLAVRQAPLIIPLKATSTPVSIQQYPMSHEARLGIKPHIQRLLDQGILVPCQSPWNTPLLPVKKPGTNDYRPVQDLREVNKRVEDIHPTVPNPYNLLSGLPPSHQWYTVLDLKDAFFCLRLHPTSQPLFAFEWRDPGMGISGQLTWTRLPQGFKNSPTLFDEALHRDLADFRIQHPDLILLQYVDDILLAATSELDCQQGTRALLQTLGDLGYRASAKKAQICQKQVKYLGYLLREGQRWLTEARKETVMGQPVPKTPRQLREFLGTAGFCRLWIPGFAEMAAPLYPLTKTGTLFSWGPDQQKAYQEIKQALLTAPALGLPDLTKPFELFVDEKQGYAKGVLTQKLGPWRRPVAYLSKKLDPVAAGWPPCLRMVAAIAVLTKDAGKLTMGQPLVILAPHAVEALVKQPPDRWLSNARMTHYQAMLLDTDRVQFGPVVALNPATLLPLPEEGAPHDCLEILAETHGTRPDLTDQPIPDADHTWYTDGSSFLQEGQRKAGAAVTTETEVIWAGALPAGTSAQRAELIALTQALKMAEGKRLNVYTDSRYAFATAHIHGEIYRRRGLLTSEGREIKNKSEILALLKALFLPKRLSIIHCLGHQKGDSAEARGNRLADQAAREAAIKTPPDTSTLL

SEQ ID NO: 18161 - protein, 671 aa, synthetic construct
TLGIEDEYRLHETSTEPDVSLGSTWLSDFPQAWAETGGMGLAVRQAPLIIPLKATSTPVSIQQYPMSHEARLGIKPHIQRLLDQGILVPCQSPWNTPLLPVKKPGTNDYRPVQDLREVNKRVEDIHPTVPNPYNLLSGLPPSHQWYTVLDLKDAFFCLRLHPTSQPLFAFEWRDPGMGISGQLTWTRLPQGFKNSPTLFNEALHRDLADFRIQHPDLILLQYVDDILLAATSELDCQQGTRALLQTLGDLGYRASAKKAQICQKQVKYLGYLLREGQRWLTEARKETVMGQPVPKTPRQLREFLGTAGFCRLWIPGFAEMAAPLYPLTKPGTLFSWGPDQQKAYQEIKQALLTAPALGLPDLTKPFELFVDEKQGYAKGVLTQKLGPWRRPVAYLSKKLDPVAAGWPPCLRMVAAIAVLTKDAGKLTMGQPLVILAPHAVEALVKQPPDRWLSNARMTHYQAMLLDTDRVQFGPVVALNPATLLPLPEEGAPHDCLEILAETHGTRPDLTDQPIPDADHTWYTDGSSFLQEGQRKAGAAVTTETEVIWAGALPAGTSAQRAELIALTQALKMAEGKRLNVYTDSRYAFATAHIHGEIYRRRGWLTSEGREIKNKSEILALLKALFLPKRLSIIHCLGHQKGDSAEARGNRLADQAAREAAIKTPPDTSTLL

SEQ ID NO: 18162 - protein, 671 aa, synthetic construct
LGIEDEYRLHETSTEPDVSLGSTWLSDFPQAWAETGGMGLAVRQAPLIIPLKATSTPVSIQQYPMSHEARLGIKPHIQRLLDQGILVPCQSPWNTPLLPVKKPGTNDYRPVQDLREVNKRVEDIHPTVPNPYNLLSGLPPSHQWYTVLDLKDAFFCLRLHPTSQPLFAFEWRDPGMGISGQLTWTRLPQGFKNSPTLFNEALHRDLADFRIQHPDLILLQYVDDILLAATSELDCQQGTRALLQTLGDLGYRASAKKAQICQKQVKYLGYLLREGQRWLTEARKETVMGQPVPKTPRQLREFLGKAGFCRLFIPGFAEMAAPLYPLTKPGTLFSWGPDQQKAYQEIKQALLTAPALGLPDLTKPFELFVDEKQGYAKGVLTQKLGPWRRPVAYLSKKLDPVAAGWPPCLRMVAAIAVLTKDAGKLTMGQPLVILAPHAVEALVKQPPDRWLSNARMTHYQAMLLDTDRVQFGPVVALNPATLLPLPEEGAPHDCLEILAETHGTRPDLTDQPIPDADHTWYTDGSSFLQEGQRKAGAAVTTETEVIWAGALPAGTSAQRAELIALTQALKMAEGKRLNVYTDSRYAFATAHIHGEIYRRRGWLTSEGREIKNKSEILALLKALFLPKRLSIIHCLGHQKGDSAEARGNRLADQAAREAAIKTPPDTSTLLI

SEQ ID NO: 18163 - protein, 671 aa, unidentified
TLNIEDEYRLHETSKEPDVSLGSTWLSDFPQAWAETGGMGLAVRQAPLIIPLKATSTPVSIKQYPMSQEARLGIKPHIQRLLDQGILVPCQSPWNTPLLPVKKPGTNDYRPVQDLREVNKRVEDIHPTVPNPYNLLSGLPPSHQWYTVLDLKDAFFCLRLHPTSQPLFAFEWRDPEMGISGQLTWTRLPQGFKNSPTLFDEALHRDLAGFRIQHPDLILLQYVDDLLLAATSELDCQQGTRALLQTLGDLGYRASAKKAQICQKQVKYLGYLLKEGQRWLTEARKETVMGQPIPKTPRQLREFLGTAGFCRLWIPGFAEMAAPLYPLTKTGTLFNWGPDQQKAFQEIKQALLTAPALGLPDLTKPFELFVDEKQGYAKGVLTQKLGPWRRPVAYLSKKLDPVAAGWPPCLRMVAAIAVLTKDAGKLTMGQPLVILAPHAVEALVKQPPDRWLSNARMTHYQALLLDTDRVQFGPVVALNPATLLPLPEEGLQHDCLDILAEAHGTRSDLMDQPLPDADHTWYTDGSSFLQEGQRKAGAAVTTETEVIWARALPAGTSAQRAELIALTQALKMAEGKKLNVYTDSRYAFATAHIHGEIYRRRGLLTSEGKEIKNKDEILALLKALFLPKRLSIIHCPGHQKGNSAEARGNRMADQAAREVATRETPETSTLL

SEQ ID NO: 18164 - protein, 671 aa, synthetic construct
TLNIEDEYRLHETSKEPDVSLGSTWLSDFPQAWAETGGMGLAVRQAPLIIPLKATSTPVSIKQYPMSQEARLGIKPHIQRLLDQGILVPCQSPWNTPLLPVKKPGTNDYRPVQDLREVNKRVEDIHPTVPNPYNLLSGLPPSHQWYTVLDLKDAFFCLRLHPTSQPLFAFEWRDPEMGISGQLTWTRLPQGFKNSPTLFNEALHRDLAGFRIQHPDLILLQYVDDLLLAATSELDCQQGTRALLQTLGDLGYRASAKKAQICQKQVKYLGYLLKEGQRWLTEARKETVMGQPIPKTPRQLREFLGTAGFCRLWIPGFAEMAAPLYPLTKPGTLFNWGPDQQKAFQEIKQALLTAPALGLPDLTKPFELFVDEKQGYAKGVLTQKLGPWRRPVAYLSKKLDPVAAGWPPCLRMVAAIAVLTKDAGKLTMGQPLVILAPHAVEALVKQPPDRWLSNARMTHYQALLLDTDRVQFGPVVALNPATLLPLPEEGLQHDCLDILAEAHGTRSDLMDQPLPDADHTWYTDGSSFLQEGQRKAGAAVTTETEVIWARALPAGTSAQRAELIALTQALKMAEGKKLNVYTDSRYAFATAHIHGEIYRRRGWLTSEGKEIKNKDEILALLKALFLPKRLSIIHCPGHQKGNSAEARGNRMADQAAREVATRETPETSTLL

SEQ ID NO: 18165 - protein, 671 aa, synthetic construct
TLNIEDEYRLHETSKEPDVSLGSTWLSDFPQAWAETGGMGLAVRQAPLIIPLKATSTPVSIKQYPMSQEARLGIKPHIQRLLDQGILVPCQSPWNTPLLPVKKPGTNDYRPVQDLREVNKRVEDIHPTVPNPYNLLSGLPPSHQWYTVLDLKDAFFCLRLHPTSQPLFAFEWRDPEMGISGQLTWTRLPQGFKNSPTLFNEALHRDLAGFRIQHPDLILLQYVDDLLLAATSELDCQQGTRALLQTLGDLGYRASAKKAQICQKQVKYLGYLLKEGQRWLTEARKETVMGQPIPKTPRQLREFLGKAGFCRLFIPGFAEMAAPLYPLTKPGTLFNWGPDQQKAFQEIKQALLTAPALGLPDLTKPFELFVDEKQGYAKGVLTQKLGPWRRPVAYLSKKLDPVAAGWPPCLRMVAAIAVLTKDAGKLTMGQPLVILAPHAVEALVKQPPDRWLSNARMTHYQALLLDTDRVQFGPVVALNPATLLPLPEEGLQHDCLDILAEAHGTRSDLMDQPLPDADHTWYTDGSSFLQEGQRKAGAAVTTETEVIWARALPAGTSAQRAELIALTQALKMAEGKKLNVYTDSRYAFATAHIHGEIYRRRGWLTSEGKEIKNKDEILALLKALFLPKRLSIIHCPGHQKGNSAEARGNRMADQAAREVATRETPETSTLL

SEQ ID NO: 18166 - protein, 671 aa, unidentified
TLNIEDEYRLHETSKGPDVPLGSTWLSDFPQAWAETGGMGLAFRQAPLIISLKATSTPVSIKQYPMSQEARLGIKPHIQRLLDQGILVPCQSPWNTPLLPVKKPGTNDYRPVQDLREVNKRVEDIHPTVPNPYNLLSGLPPSHQWYTVLDLKDAFFCLRLHPTSQSLFAFEWKDPEMGISGQLTWTRLPQGFKNSPTLFDEALHRDLADFRIQHPDLILLQYVDDLLLAATSELDCQQGTRALLQTLGDLGYRASAKKAQICQKQVKYLGYLLKEGQRWLTEARKETVMGQPTPKTPRQLREFLGTAGLCRLWIPGFAEMAAPLYPLTKTGTLFKWGPDQQKAYQEIKQALLTAPALGLPDLTKPFELFVDEKQGYAKGVLTQKLGPWRRPVAYLSKKLDPVAAGWPPCLRMVAAIAVLTKDVGKLTMGQPLVILAPHAVEALVKQPPDRWLSNARMTHYQALLLDTDRVQFGPIVALNPATLLPLPEEGLQHDCLDILAEAHGTRPDLTDQPLPDADHTWYTDGSSFLQEGQRRAGAAVTTETEVIWAKALPAGTSAQRAELIALTQALKMAAGKKLNVYTDSRYAFATAHIHGEIYRRRGLLTSEGKEIKNKDEILALLKALFLPKRLSIIHCPGHQKGNHAEARGNRMADQAAREVATRETPETSTLL

SEQ ID NO: 18167 - protein, 671 aa, synthetic construct
TLNIEDEYRLHETSKGPDVPLGSTWLSDFPQAWAETGGMGLAFRQAPLIISLKATSTPVSIKQYPMSQEARLGIKPHIQRLLDQGILVPCQSPWNTPLLPVKKPGTNDYRPVQDLREVNKRVEDIHPTVPNPYNLLSGLPPSHQWYTVLDLKDAFFCLRLHPTSQSLFAFEWKDPEMGISGQLTWTRLPQGFKNSPTLFNEALHRDLADFRIQHPDLILLQYVDDLLLAATSELDCQQGTRALLQTLGDLGYRASAKKAQICQKQVKYLGYLLKEGQRWLTEARKETVMGQPTPKTPRQLREFLGTAGLCRLWIPGFAEMAAPLYPLTKPGTLFKWGPDQQKAYQEIKQALLTAPALGLPDLTKPFELFVDEKQGYAKGVLTQKLGPWRRPVAYLSKKLDPVAAGWPPCLRMVAAIAVLTKDVGKLTMGQPLVILAPHAVEALVKQPPDRWLSNARMTHYQALLLDTDRVQFGPIVALNPATLLPLPEEGLQHDCLDILAEAHGTRPDLTDQPLPDADHTWYTDGSSFLQEGQRRAGAAVTTETEVIWAKALPAGTSAQRAELIALTQALKMAAGKKLNVYTDSRYAFATAHIHGEIYRRRGWLTSEGKEIKNKDEILALLKALFLPKRLSIIHCPGHQKGNHAEARGNRMADQAAREVATRETPETSTLL

SEQ ID NO: 18168 - protein, 671 aa, synthetic construct
TLNIEDEYRLHETSKGPDVPLGSTWLSDFPQAWAETGGMGLAFRQAPLIISLKATSTPVSIKQYPMSQEARLGIKPHIQRLLDQGILVPCQSPWNTPLLPVKKPGTNDYRPVQDLREVNKRVEDIHPTVPNPYNLLSGLPPSHQWYTVLDLKDAFFCLRLHPTSQSLFAFEWKDPEMGISGQLTWTRLPQGFKNSPTLFNEALHRDLADFRIQHPDLILLQYVDDLLLAATSELDCQQGTRALLQTLGDLGYRASAKKAQICQKQVKYLGYLLKEGQRWLTEARKETVMGQPTPKTPRQLREFLGKAGLCRLFIPGFAEMAAPLYPLTKPGTLFKWGPDQQKAYQEIKQALLTAPALGLPDLTKPFELFVDEKQGYAKGVLTQKLGPWRRPVAYLSKKLDPVAAGWPPCLRMVAAIAVLTKDVGKLTMGQPLVILAPHAVEALVKQPPDRWLSNARMTHYQALLLDTDRVQFGPIVALNPATLLPLPEEGLQHDCLDILAEAHGTRPDLTDQPLPDADHTWYTDGSSFLQEGQRRAGAAVTTETEVIWAKALPAGTSAQRAELIALTQALKMAAGKKLNVYTDSRYAFATAHIHGEIYRRRGWLTSEGKEIKNKDEILALLKALFLPKRLSIIHCPGHQKGNHAEARGNRMADQAAREVATRETPETSTLL

SEQ ID NO: 18169 - protein, 671 aa, synthetic construct
TLNIEDEYRLHETSKGPDVPLGSTWLSDFPQAWAETGGMGLAVRQAPLIIPLKATSTPVSIKQYPMSQEARLGIKPHIQRLLDQGILVPCQSPWNTPLLPVKKPGTNDYRPVQDLREVNKRVEDIHPTVPNPYNLLSGLPPSHQWYTVLDLKDAFFCLRLHPTSQSLFAFEWRDPEMGISGQLTWTRLPQGFKNSPTLFNEALHRDLADFRIQHPDLILLQYVDDLLLAATSELDCQQGTRALLQTLGDLGYRASAKKAQICQKQVKYLGYLLKEGQRWLTEARKETVMGQPTPKTPRQLREFLGTAGFCRLWIPGFAEMAAPLYPLTKPGTLFEWGPDQQKAYQEIKQALLTAPALGLPDLTKPFELFVDEKQGYAKGVLTQKLGPWRRPVAYLSKKLDPVAAGWPPCLRMVAAIAVLTKDAGKLTMGQPLVILAPHAVEALVKQPPDRWLSNARMTHYQALLLDTDRVQFGPIVALNPATLLPLPEEGLQHDCLDILAEAHGTRPDLTDQPLPDADHTWYTDGSSFLQEGQRKAGAAVTTETEVVWAKALPAGTSAQRAELIALTQALKMAEGKKLNVYTDSRYAFATAHIHGEIYRRRGWLTSEGKEIKNKDEILALLKALFLPKRLSIIHCPGHQKGNRAEARGNRMADQAAREVATRETPETSTLL

SEQ ID NO: 18170 - protein, 671 aa, synthetic construct
TLNIEDEYRLHETSKGPDVPLGSTWLSDFPQAWAETGGMGLAVRQAPLIIPLKATSTPVSIKQYPMSQEARLGIKPHIQRLLDQGILVPCQSPWNTPLLPVKKPGTNDYRPVQDLREVNKRVEDIHPTVPNPYNLLSGLPPSHQWYTVLDLKDAFFCLRLHPTSQSLFAFEWRDPEMGISGQLTWTRLPQGFKNSPTLFNEALHRDLADFRIQHPDLILLQYVDDLLLAATSELDCQQGTRALLQTLGDLGYRASAKKAQICQKQVKYLGYLLKEGQRWLTEARKETVMGQPTPKTPRQLREFLGKAGFCRLFIPGFAEMAAPLYPLTKPGTLFEWGPDQQKAYQEIKQALLTAPALGLPDLTKPFELFVDEKQGYAKGVLTQKLGPWRRPVAYLSKKLDPVAAGWPPCLRMVAAIAVLTKDAGKLTMGQPLVILAPHAVEALVKQPPDRWLSNARMTHYQALLLDTDRVQFGPIVALNPATLLPLPEEGLQHDCLDILAEAHGTRPDLTDQPLPDADHTWYTDGSSFLQEGQRKAGAAVTTETEVVWAKALPAGTSAQRAELIALTQALKMAEGKKLNVYTDSRYAFATAHIHGEIYRRRGWLTSEGKEIKNKDEILALLKALFLPKRLSIIHCPGHQKGNRAEARGNRMADQAAREVATRETPETSTLL

SEQ ID NO: 18171 - protein, 671 aa, synthetic construct
TLNIEDEHRLHETSKEPDVSLGSTWLSDFPQAWAETGGMGLAVRQAPLIIPLKATSTPVSIKQYPMSQEARLGIKPHIQRLLDQGILVPCQSPWNTPLLPVKKPGTNDYRPVQDLREVNKRVEDIHPTVPNPYNLLSGLPPSHQWYTVLDLKDAFFCLRLHPTSQPLFAFEWRDPEMGISGQLTWTRLPQGFKNSPTLFNEALHRDLADFRIQHPDLILLQYVDDLLLAATSELDCQQGTRALLQTLGNLGYRASAKKAQICQKQVKYLGYLLKEGQRWLTEARKETVMGQPTPKTPRQLREFLGTAGFCRLWIPGFAEMAAPLYPLTKPGTLFNWGPDQQKAYQEIKQALLTAPALGLPDLTKPFELFVDEKQGYAKGVLTQKLGPWRRPVAYLSKKLDPVAAGWPPCLRMVAAIAVLTKDAGKLTMGQPLVILAPHAVEALVKQPPDRWLSNARMTHYQALLLDTDRVQFGPVVALNPATLLPLPEEGLQHNCLDILAEAHGTRPDLTDQPLPDADHTWYTDGSSLLQEGQRKAGAAVTTETEVIWAKALPAGTSAQRAELIALTQALKMAEGKKLNVYTDSRYAFATAHIHGEIYRRRGWLTSEGKEIKNKDEILALLKALFLPKRLSIIHCPGHQKGHSAEARGNRMADQAARKAAITETPDTSTLL

SEQ ID NO: 18172 - protein, 691 aa, synthetic construct
TLNIEDEYRLHETSKEPDVSLGSTWLSDFPQAWAETGGMGLAVRQAPLIIPLKATSTPVSIKQYPMSQEARLGIKPHIQRLLDQGILVPCQSPWNTPLLPVKKPGTNDYRPVQDLREVNKRVEDIHPTVPNPYNLLSGLPPSHQWYTVLDLKDAFFCLRLHPTSQPLFAFEWRDPEMGISGQLTWTRLPQGFKNSPTLFNEALHRDLADFRIQHPDLILLQYVDDLLLAATSELDCQQGTRALLQTLGNLGYRASAKKAQICQKQVKYLGYLLKEGQRWLTEARKETVMGQPTPKTPRQLREFLGKAGFCRLFIPGFAEMAAPLYPLTKPGTLFNWGPDQQKAYQEIKQALLTAPALGLPDLTKPFELFVDEKQGYAKGVLTQKLGPWRRPVAYLSKKLDPVAAGWPPCLRMVAAIAVLTKDAGKLTMGQPLVILAPHAVEALVKQPPDRWLSNARMTHYQALLLDTDRVQFGPVVALNPATLLPLPEEGLQHNCLDILAEAHGTRPDLTDQPLPDADHTWYTDGSSLLQEGQRKAGAAVTTETEVIWAKALPAGTSAQRAELIALTQALKMAEGKKLNVYTDSRYAFATAHIHGEIYRRRGWLTSEGKEIKNKDEILALLKALFLPKRLSIIHCPGHQKGHSAEARGNRMADQAARKAAITETPDTSTLLIENSSPSGGSKRTADGSEFE

SEQ ID NO: 18173 - protein, 671 aa, unidentified
TLNIEDEYRLHEISTEPDVSPGSTWLSDFPQAWAETGGMGLAVRQAPLIIPLKATSTPVSIKQYPMSQEAKLGIKPHIQRLLDQGILVPCQSPWNTPLLPVKKPGTNDYRPVQGLREVNKRVEDIHPTVPNPYNLLSGLPTSHRWYTVLDLKDAFFCLRLHPTSQPLFASEWRDPGMGISGQLTWTRLPQGFKNSPTLFDEALHRGLADFRIQHPDLILLQYVDDLLLAATSELDCQQGTRALLKTLGNLGYRASAKKAQICQKQVKYLGYLLREGQRWLTEARKETVMGQPTPKTPRQLREFLGTAGFCRLWIPRFAEMAAPLYPLTKTGTLFNWGPDQQKAYHEIKQALLTAPALGLPDLTKPFELFVDEKQGYAKGVLTQKLGPWRRPVAYLSKKLDPVAAGWPPCLRMVAAIAVLTKDAGKLTMGQPLVILAPHAVEALVKQPPDRWLSNARMTHYQAMLLDTDRVQFGPVVALNPATLLPLPEEGAPHDCLEILAETHGTEPDLTDQPIPDADHTWYTDGSSFLQEGQRKAGAAVTTETEVIWARALPAGTSAQRAELIALTQALKMAEGKRLNVYTDSRYAFATAHIHGEIYKRRGLLTSEGREIKNKSEILALLKALFLPKRLSIIHCLGHQKGDSAEARGNRLADQAAREAAIKTPPDTSTLL

SEQ ID NO: 18174 - protein, 671 aa, synthetic construct
TLNIEDEYRLHEISTEPDVSPGSTWLSDFPQAWAETGGMGLAVRQAPLIIPLKATSTPVSIKQYPMSQEAKLGIKPHIQRLLDQGILVPCQSPWNTPLLPVKKPGTNDYRPVQGLREVNKRVEDIHPTVPNPYNLLSGLPTSHRWYTVLDLKDAFFCLRLHPTSQPLFASEWRDPGMGISGQLTWTRLPQGFKNSPTLFNEALHRGLADFRIQHPDLILLQYVDDLLLAATSELDCQQGTRALLKTLGNLGYRASAKKAQICQKQVKYLGYLLREGQRWLTEARKETVMGQPTPKTPRQLREFLGTAGFCRLWIPRFAEMAAPLYPLTKPGTLFNWGPDQQKAYHEIKQALLTAPALGLPDLTKPFELFVDEKQGYAKGVLTQKLGPWRRPVAYLSKKLDPVAAGWPPCLRMVAAIAVLTKDAGKLTMGQPLVILAPHAVEALVKQPPDRWLSNARMTHYQAMLLDTDRVQFGPVVALNPATLLPLPEEGAPHDCLEILAETHGTEPDLTDQPIPDADHTWYTDGSSFLQEGQRKAGAAVTTETEVIWARALPAGTSAQRAELIALTQALKMAEGKRLNVYTDSRYAFATAHIHGEIYKRRGWLTSEGREIKNKSEILALLKALFLPKRLSIIHCLGHQKGDSAEARGNRLADQAAREAAIKTPPDTSTLL

SEQ ID NO: 18175 - protein, 691 aa, Mouse mammary tumor virus
WVQEISDSRPMLHIYLNGRRFLGLLNTGADKTCIAGRDWPANWPIHQTESSLQGLGMACGVARSSQPLRWQHEDKSGIIHPFVIPTLPFTLWGRDIMKDIKVRLMTDSPDDSQDLMIGAIESNLFADQISWKSDQPVWLNQWPLKQEKLQALQQLVTEQLQLGHLEESNSPWNTPVFVIKKKSGKWRLLQDLRAVNATMHDMGALQPGLPSPVAVPKGWEIIIIDLQDCFFNIKLHPEDCKRFAFSVPSPNFKRPYQRFQWKVLPQGMKNSPTLCQKFVDKAILTVRDKYQDSYIVHYMDDILLAHPSRSIVDEILTSMIQALNKHGLVVSTEKIQKYDNLKYLGTHIQGDSVSYQKLQIRTDKLRTLNDFQKLLGNINWIRPFLKLTTGELKPLFEILNGDSNPISTRKLTPEACKALQLMNERLSTARVKRLDLSQPWSLCILKTEYTPTACLWQDGVVEWIHLPHISPKVITPYDIFCTQLIIKGRHRSKELFSKDPDYIVVPYTKVQFDLLLQEKEDWPISLLGFLGEVHFHLPKDPLLTFTLQTAIIFPHMTSTTPLEKGIVIFTDGSANGRSVTYIQGREPIIKENTQNTAQQAEIVAVITAFEEVSQPFNLYTDSKYVTGLFPEIETATLSPRTKIYTELKHLQRLIHKRQEKFYIGHIRGHTGLPGPLAQGNAYADSLTRILT

SEQ ID NO: 18176 - protein, 691 aa, synthetic construct
WVQEISDSRPMLHIYLNGRRFLGLLNTGADKTCIAGRDWPANWPIHQTESSLQGLGMACGVARSSQPLRWQHEDKSGIIHPFVIPTLPFTLWGRDIMKDIKVRLMTDSPDDSQDLMIGAIESNLFADQISWKSDQPVWLNQWPLKQEKLQALQQLVTEQLQLGHLEESNSPWNTPVFVIKKKSGKWRLLQDLRAVNATMHDMGALQPGLPSPVAVPKGWEIIIIDLQDCFFNIKLHPEDCKRFAFSVPSPNFKRPYQRFQWKVLPQGMKNSPTLCQKFVDKAILTVRDKYQDSYIVHYMDDILLAHPSRSIVDEILTSMIQALNKHGLVVSTEKIQKYDNLKYLGTHIQGDSVSYQKLQIRTDKLRTLNDFQKLLGNINWIRPFLKLTTGELKPLFEILNPDSNPISTRKLTPEACKALQLMNERLSTARVKRLDLSQPWSLCILKTEYTPTACLWQDGVVEWIHLPHISPKVITPYDIFCTQLIIKGRHRSKELFSKDPDYIVVPYTKVQFDLLLQEKEDWPISLLGFLGEVHFHLPKDPLLTFTLQTAIIFPHMTSTTPLEKGIVIFTDGSANGRSVTYIQGREPIIKENTQNTAQQAEIVAVITAFEEVSQPFNLYTDSKYVTGLFPEIETATLSPRTKIYTELKHLQRLIHKRQEKFYIGHIRGHTGLPGPLAQGNAYADSLTRILT

SEQ ID NO: 18177 - protein, 691 aa, synthetic construct
VQEISDSRPMLHIYLNGRRFLGLLDTGADKTCIAGRDWPANWPIHQTESSLQGLGMACGVARSSQPLRWQHEDKSGIIHPFVIPTLPFTLWGRDIMKDIKVRLMTDSPDDSQDLMIGAIESNLFADQISWKSDQPVWLNQWPLKQEKLQALQQLVTEQLQLGHLEESNSPWNTPVFVIKKKSGKWRLLQDLRAVNATMHDMGALQPGLPSPVAVPKGWEIIIIDLQDCFFNIKLHPEDCKRFAFSVPSPNFKRPYQRFQWKVLPQGMKNSPTLCQKFVDKAILTVRDKYQDSYIVHYMDDILLAHPSRSIVDEILTSMIQALNKHGLVVSTEKIQKYDNLKYLGTHIQGDSVSYQKLQIRTDKLRTLNDFQKLLGNINWIRPFLKLTTGELKPLFEILNPDSNPISTRKLTPEACKALQLMNERLSTARVKRLDLSQPWSLCILKTEYTPTACLWQDGVVEWIHLPHISPKVITPYDIFCTQLIIKGRHRSKELFSKDPDYIVVPYTKVQFDLLLQEKEDWPISLLGFLGEVHFHLPKDPLLTFTLQTAIIFPHMTSTTPLEKGIVIFTDGSANGRSVTYIQGREPIIKENTQNTAQQAEIVAVITAFEEVSQPFNLYTDSKYVTGLFPEIETATLSPRTKIYTELKHLQRLIHKRQEKFYIGHIRGHTGLPGPLAQGNAYADSLTRILTA

SEQ ID NO: 18178 - protein, 691 aa, synthetic construct
WVQEISDSRPMLHIYLNGRRFLGLLNTGADKTCIAGRDWPANWPIHQTESSLQGLGMACGVARSSQPLRWQHEDKSGIIHPFVIPTLPFTLWGRDIMKDIKVRLMTDSPDDSQDLMIGAIESNLFADQISWKSDQPVWLNQWPLKQEKLQALQQLVTEQLQLGHLEESNSPWNTPVFVIKKKSGKWRLLQDLRAVNATMHDMGALQPGLPSPVAPPKGWEIIIIDLQDCFFNIKLHPEDCKRFAFSVPSPNFKRPYQRFQWKVLPQGMKNSPTLCQKFVDKAILTVRDKYQDSYIVHYMDDILLAHPSRSIVDEILTSMIQALNKHGLVVSTEKIQKYDNLKYLGTHIQGDSVSYQKLQIRTDKLRTLNDFQKLLGNINWIRPFLKLTTGELKPLFEILNPDSNPISTRKLTPEACKALQLMNERLSTARVKRLDLSQPWSLCILKTEYTPTACLWQDGVVEWIHLPHISPKVITPYDIFCTQLIIKGRHRSKELFSKDPDYIVVPYTKVQFDLLLQEKEDWPISLLGFLGEVHFHLPKDPLLTFTLQTAIIFPHMTSTTPLEKGIVIFTDGSANGRSVTYIQGREPIIKENTQNTAQQAEIVAVITAFEEVSQPFNLYTDSKYVTGLFPEIETATLSPRTKIYTELKHLQRLIHKRQEKFYIGHIRGHTGLPGPLAQGNAYADSLTRILT

SEQ ID NO: 18179 - protein, 691 aa, synthetic construct
VQEISDSRPMLHIYLNGRRFLGLLDTGADKTCIAGRDWPANWPIHQTESSLQGLGMACGVARSSQPLRWQHEDKSGIIHPFVIPTLPFTLWGRDIMKDIKVRLMTDSPDDSQDLMIGAIESNLFADQISWKSDQPVWLNQWPLKQEKLQALQQLVTEQLQLGHLEESNSPWNTPVFVIKKKSGKWRLLQDLRAVNATMHDMGALQPGLPSPPAVPKGWEIIIIDLQDCFFNIKLHPEDCKRFAFSVPSPNFKRPYQRFQWKVLPQGMKNSPTLCQKFVDKAILTVRDKYQDSYIVHYMDDILLAHPSRSIVDEILTSMIQALNKHGLVVSTEKIQKYDNLKYLGTHIQGDSVSYQKLQIRTDKLRTLNDFQKLLGNINWIRPFLKLTTGELKPLFEILNPDSNPISTRKLTPEACKALQLMNERLSTARVKRLDLSQPWSLCILKTEYTPTACLWQDGVVEWIHLPHISPKVITPYDIFCTQLIIKGRHRSKELFSKDPDYIVVPYTKVQFDLLLQEKEDWPISLLGFLGEVHFHLPKDPLLTFTLQTAIIFPHMTSTTPLEKGIVIFTDGSANGRSVTYIQGREPIIKENTQNTAQQAEIVAVITAFEEVSQPFNLYTDSKYVTGLFPEIETATLSPRTKIYTELKHLQRLIHKRQEKFYIGHIRGHTGLPGPLAQGNAYADSLTRILTA

SEQ ID NO: 18180 - protein, 691 aa, Mouse mammary tumor virus
VQEISDSRPMLHIYLNGRRFLGLLDTGADKTCIAGRDWPANWPIHQTESSLQGLGMACGVARSSQPLRWQHEDKSGIIHPFVIPTLPFTLWGRDIMKDIKVRLMTDSPDDSQDLMIGAIESNLFADQISWKSDQPVWLNQWPLKQEKLQALQQLVTEQLQLGHLEESNSPWNTPVFVIKKKSGKWRLLQDLRAVNATMHDMGALQPGLPSPVAVPKGWEIIIIDLQDCFFNIKLHPEDCKRFAFSVPSPNFKRPYQRFQWKVLPQGMKNSPTLCQKFVDKAILTVRDKYQDSYIVHYMDDILLAHPSRSIVDEILTSMIQALNKHGLVVSTEKIQKYDNLKYLGTHIQGDSVSYQKLQIRTDKLRTLNDFQKLLGNINWIRPFLKLTTGELKPLFEILNGDSNPISTRKLTPEACKALQLMNERLSTARVKRLDLSQPWSLCILKTEYTPTACLWQDGVVEWIHLPHISPKVITPYDIFCTQLIIKGRHRSKELFSKDPDYIVVPYTKVQFDLLLQEKEDWPISLLGFLGEVHFHLPKDPLLTFTLQTAIIFPHMTSTTPLEKGIVIFTDGSANGRSVTYIQGREPIIKENTQNTAQQAEIVAVITAFEEVSQPFNLYTDSKYVTGLFPEIETATLSPRTKIYTELKHLQRLIHKRQEKFYIGHIRGHTGLPGPLAQGNAYADSLTRILTA

SEQ ID NO: 18181 - protein, 599 aa, Mouse mammary tumor virus
GRDIMKDIKVRLMTDSPDDSQDLMIGAIESNLFADQISWKSDQPVWLNQWPLKQEKLQALQQLVTEQLQLGHLEESNSPWNTPVFVIKKKSGKWRLLQDLRAVNATMHDMGALQPGLPSPVAVPKGWEIIIIDLQDCFFNIKLHPEDCKRFAFSVPSPNFKRPYQRFQWKVLPQGMKNSPTLCQKFVDKAILTVRDKYQDSYIVHYMDDILLAHPSRSIVDEILTSMIQALNKHGLVVSTEKIQKYDNLKYLGTHIQGDSVSYQKLQIRTDKLRTLNDFQKLLGNINWIRPFLKLTTGELKPLFEILNGDSNPISTRKLTPEACKALQLMNERLSTARVKRLDLSQPWSLCILKTEYTPTACLWQDGVVEWIHLPHISPKVITPYDIFCTQLIIKGRHRSKELFSKDPDYIVVPYTKVQFDLLLQEKEDWPISLLGFLGEVHFHLPKDPLLTFTLQTAIIFPHMTSTTPLEKGIVIFTDGSANGRSVTYIQGREPIIKENTQNTAQQAEIVAVITAFEEVSQPFNLYTDSKYVTGLFPEIETATLSPRTKIYTELKHLQRLIHKRQEKFYIGHIRGHTGLPGPLAQGNAYADSLTRILT

SEQ ID NO: 18182 - protein, 599 aa, synthetic construct
GRDIMKDIKVRLMTDSPDDSQDLMIGAIESNLFADQISWKSDQPVWLNQWPLKQEKLQALQQLVTEQLQLGHLEESNSPWNTPVFVIKKKSGKWRLLQDLRAVNATMHDMGALQPGLPSPVAVPKGWEIIIIDLQDCFFNIKLHPEDCKRFAFSVPSPNFKRPYQRFQWKVLPQGMKNSPTLCQKFVDKAILTVRDKYQDSYIVHYMDDILLAHPSRSIVDEILTSMIQALNKHGLVVSTEKIQKYDNLKYLGTHIQGDSVSYQKLQIRTDKLRTLNDFQKLLGNINWIRPFLKLTTGELKPLFEILNPDSNPISTRKLTPEACKALQLMNERLSTARVKRLDLSQPWSLCILKTEYTPTACLWQDGVVEWIHLPHISPKVITPYDIFCTQLIIKGRHRSKELFSKDPDYIVVPYTKVQFDLLLQEKEDWPISLLGFLGEVHFHLPKDPLLTFTLQTAIIFPHMTSTTPLEKGIVIFTDGSANGRSVTYIQGREPIIKENTQNTAQQAEIVAVITAFEEVSQPFNLYTDSKYVTGLFPEIETATLSPRTKIYTELKHLQRLIHKRQEKFYIGHIRGHTGLPGPLAQGNAYADSLTRILT

SEQ ID NO: 18183 - protein, 599 aa, synthetic construct
GRDIMKDIKVRLMTDSPDDSQDLMIGAIESNLFADQISWKSDQPVWLNQWPLKQEKLQALQQLVTEQLQLGHLEESNSPWNTPVFVIKKKSGKWRLLQDLRAVNATMHDMGALQPGLPSPVAPPKGWEIIIIDLQDCFFNIKLHPEDCKRFAFSVPSPNFKRPYQRFQWKVLPQGMKNSPTLCQKFVDKAILTVRDKYQDSYIVHYMDDILLAHPSRSIVDEILTSMIQALNKHGLVVSTEKIQKYDNLKYLGTHIQGDSVSYQKLQIRTDKLRTLNDFQKLLGNINWIRPFLKLTTGELKPLFEILNPDSNPISTRKLTPEACKALQLMNERLSTARVKRLDLSQPWSLCILKTEYTPTACLWQDGVVEWIHLPHISPKVITPYDIFCTQLIIKGRHRSKELFSKDPDYIVVPYTKVQFDLLLQEKEDWPISLLGFLGEVHFHLPKDPLLTFTLQTAIIFPHMTSTTPLEKGIVIFTDGSANGRSVTYIQGREPIIKENTQNTAQQAEIVAVITAFEEVSQPFNLYTDSKYVTGLFPEIETATLSPRTKIYTELKHLQRLIHKRQEKFYIGHIRGHTGLPGPLAQGNAYADSLTRILT

SEQ ID NO: 18184 - protein, 585 aa, Mason-Pfizer monkey virus
LTAAIDILAPQQCAEPITWKSDEPVWVDQWPLTNDKLAAAQQLVQEQLEAGHITESSSPWNTPIFVIKKKSGKWRLLQDLRAVNATMVLMGALQPGLPSPVAIPQGYLKIIIDLKDCFFSIPLHPSDQKRFAFSLPSTNFKEPMQRFQWKVLPQGMANSPTLCQKYVATAIHKVRHAWKQMYIIHYMDDILIAGKDGQQVLQCFDQLKQELTAAGLHIAPEKVQLQDPYTYLGFELNGPKITNQKAVIRKDKLQTLNDFQKLLGDINWLRPYLKLTTGDLKPLFDTLKGDSDPNSHRSLSKEALASLEKVETAIAEQFVTHINYSLPLIFLIFNTALTPTGLFWQDNPIMWIHLPASPKKVLLPYYDAIADLIILGRDHSKKYFGIEPSTIIQPYSKSQIDWLMQNTEMWPIACASFVGILDNHYPPNKLIQFCKLHTFVFPQIISKTPLNNALLVFTDGSSTGMAAYTLTDTTIKFQTNLNSAQLVELQALIAVLSAFPNQPLNIYTDSAYLAHSIPLLETVAQIKHISETAKLFLQCQQLIYNRSIPFYIGHVRAHSGLPGPIAQGNQRADLATKIVASNINT

SEQ ID NO: 18185 - protein, 585 aa, synthetic construct
LTAAIDILAPQQCAEPITWKSDEPVWVDQWPLTNDKLAAAQQLVQEQLEAGHITESSSPWNTPIFVIKKKSGKWRLLQDLRAVNATMVLMGALQPGLPSPVAPPQGYLKIIIDLKDCFFSIPLHPSDQKRFAFSLPSTNFKEPMQRFQWKVLPQGMANSPTLCQKYVATAIHKVRHAWKQMYIIHYMDDILIAGKDGQQVLQCFDQLKQELTAAGLHIAPEKVQLQDPYTYLGFELNGPKITNQKAVIRKDKLQTLNDFQKLLGDINWLRPYLKLTTGDLKPLFDTLKPDSDPNSHRSLSKEALASLEKVETAIAEQFVTHINYSLPLIFLIFNTALTPTGLFWQDNPIMWIHLPASPKKVLLPYYDAIADLIILGRDHSKKYFGIEPSTIIQPYSKSQIDWLMQNTEMWPIACASFVGILDNHYPPNKLIQFCKLHTFVFPQIISKTPLNNALLVFTDGSSTGMAAYTLTDTTIKFQTNLNSAQLVELQALIAVLSAFPNQPLNIYTDSAYLAHSIPLLETVAQIKHISETAKLFLQCQQLIYNRSIPFYIGHVRAHSGLPGPIAQGNQRADLATKIVASNINT

SEQ ID NO: 18186 - protein, 665 aa, unidentified
TLQLDDEYRLYSPLVKPDQNIQFWLEQFPQAWAETAGMGLAKQVPPQVIQLKASATPVSVRQYPLSKEAQEGIRPHVQRLIQQGILVPVQSPWNTPLLPVRKPGTNDYRPVQDLREVNKRVQDIHPTVPNPYNLLCALPPQRSWYTVLDLKDAFFCLRLHPTSQPLFAFEWRDPGTGRTGQLTWTRLPQGFKNSPTIFDEALHRDLANFRIQHPQVTLLQYVDDLLLAGATKQDCLEGTKALLLELSDLGYRASAKKAQICRREVTYLGYSLRDGQRWLTEARKKTVVQIPAPTTAKQVREFLGTAGFCRLWIPGFATLAAPLYPLTKEKGEFSWAPEHQKAFDAIKKALLSAPALALPDVTKPFTLYVDERKGVARGVLTQTLGPWRRPVAYLSKKLDPVASGWPVCLKAIAAVAILVKDADKLTLGQNITVIAPHALENIVRQPPDRWMTNARMTHYQSLLLTERVTFAPPAALNPATLLPEETDEPVTHDCHQLLIEETGVRKDLTDIPLTGEVLTWFTDGSSYVVEGKRMAGAAVVDGTRTIWASSLPEGTSAQKAELMALTQALRLAEGKSINIYTDSRYAFATAHVHGAIYKQRGLLTSAGREIKNKEEILSLLEALHLPKRLAIIHCPGHQKAKDPISRGNQMADRVAKQAAQGVNLL

SEQ ID NO: 18187 - protein, 665 aa, synthetic construct
TLQLDDEYRLYSPLVKPDQNIQFWLEQFPQAWAETAGMGLAKQVPPQVIQLKASATPVSVRQYPLSKEAQEGIRPHVQRLIQQGILVPVQSPWNTPLLPVRKPGTNDYRPVQDLREVNKRVQDIHPTVPNPYNLLCALPPQRSWYTVLDLKDAFFCLRLHPTSQPLFAFEWRDPGTGRTGQLTWTRLPQGFKNSPTIFNEALHRDLANFRIQHPQVTLLQYVDDLLLAGATKQDCLEGTKALLLELSDLGYRASAKKAQICRREVTYLGYSLRDGQRWLTEARKKTVVQIPAPTTAKQVREFLGTAGFCRLWIPGFATLAAPLYPLTKPKGEFSWAPEHQKAFDAIKKALLSAPALALPDVTKPFTLYVDERKGVARGVLTQTLGPWRRPVAYLSKKLDPVASGWPVCLKAIAAVAILVKDADKLTLGQNITVIAPHALENIVRQPPDRWMTNARMTHYQSLLLTERVTFAPPAALNPATLLPEETDEPVTHDCHQLLIEETGVRKDLTDIPLTGEVLTWFTDGSSYVVEGKRMAGAAVVDGTRTIWASSLPEGTSAQKAELMALTQALRLAEGKSINIYTDSRYAFATAHVHGAIYKQRGWLTSAGREIKNKEEILSLLEALHLPKRLAIIHCPGHQKAKDPISRGNQMADRVAKQAAQGVNLL

SEQ ID NO: 18188 - protein, 663 aa, synthetic construct
LDDEYRLYSPLVKPDQNIQFWLEQFPQAWAETAGMGLAKQVPPQVIQLKASATPVSVRQYPLSKEAQEGIRPHVQRLIQQGILVPVQSPWNTPLLPVRKPGTNDYRPVQDLREVNKRVQDIHPTVPNPYNLLCALPPQRSWYTVLDLKDAFFCLRLHPTSQPLFAFEWRDPGTGRTGQLTWTRLPQGFKNSPTIFNEALHRDLANFRIQHPQVTLLQYVDDLLLAGATKQDCLEGTKALLLELSDLGYRASAKKAQICRREVTYLGYSLRDGQRWLTEARKKTVVQIPAPTTAKQVREFLGKAGFCRLFIPGFATLAAPLYPLTKPKGEFSWAPEHQKAFDAIKKALLSAPALALPDVTKPFTLYVDERKGVARGVLTQTLGPWRRPVAYLSKKLDPVASGWPVCLKAIAAVAILVKDADKLTLGQNITVIAPHALENIVRQPPDRWMTNARMTHYQSLLLTERVTFAPPAALNPATLLPEETDEPVTHDCHQLLIEETGVRKDLTDIPLTGEVLTWFTDGSSYVVEGKRMAGAAVVDGTRTIWASSLPEGTSAQKAELMALTQALRLAEGKSINIYTDSRYAFATAHVHGAIYKQRGWLTSAGREIKNKEEILSLLEALHLPKRLAIIHCPGHQKAKDPISRGNQMADRVAKQAAQGVNLLP

SEQ ID NO: 18189 - protein, 751 aa, Macaque simian foamy virus
MDPLQLLQPLEAEIKGTKLKAHWNSGATITCVPEAFLEDERPIQTMLIKTIHGEKQQDVYYLTFKVQGRKVEAEVLASPYDYILLNPSDVPWLMKKPLQLTVLVPLHEYQERLLQQTALPKEQKELLQKLFLKYDALWQHWENQVGHRRIKPHNIATGTLAPRPQKQYPINPKAKPSIQIVIDDLLKQGVLIQQNSTMNTPVYPVPKPDGKWRMVLDYREVNKTIPLIAAQNQHSAGILSSIYRGKYKTTLDLTNGFWAHPITPESYWLTAFTWQGKQYCWTRLPQGFLNSPALFTADVVDLLKEIPNVQAYVDDIYISHDDPQEHLEQLEKIFSILLNAGYVVSLKKSEIAQREVEFLGFNITKEGRGLTDTFKQKLLNITPPKDLKQLQSILGLLNFARNFIPNYSELVKPLYTIVANANGKFISWTEDNSNQLQHIISVLNQADNLEERNPETRLIIKVNSSPSAGYIRYYNEGSKRPIMYVNYIFSKAEAKFTQTEKLLTTMHKGLIKAMDLAMGQEILVYSPIVSMTKIQRTPLPERKALPVRWITWMTYLEDPRIQFHYDKSLPELQQIPNVTEDVIAKTKHPSEFAMVFYTDGSAIKHPDVNKSHSAGMGIAQVQFIPEYKIVHQWSIPLGDHTAQLAEIAAVEFACKKALKISGPVLIVTDSFYVAESANKELPYWKSNGFLNNKKKPLRHVSKWKSIAECLQLKPDIIIMHEKGHQQPMTTLHTEGNNLADKLATQGSYVVH

SEQ ID NO: 18190 - protein, 751 aa, synthetic construct
MDPLQLLQPLEAEIKGTKLKAHWNSGATITCVPEAFLEDERPIQTMLIKTIHGEKQQDVYYLTFKVQGRKVEAEVLASPYDYILLNPSDVPWLMKKPLQLTVLVPLHEYQERLLQQTALPKEQKELLQKLFLKYDALWQHWENQVGHRRIKPHNIATGTLAPRPQKQYPINPKAKPSIQIVIDDLLKQGVLIQQNSTMNTPVYPVPKPDGKWRMVLDYREVNKTIPLIAAQNQHSAGILSSIYRGKYKTTLDLTNGFWAHPITPESYWLTAFTWQGKQYCWTRLPQGFLNSPALFNADVVDLLKEIPNVQAYVDDIYISHDDPQEHLEQLEKIFSILLNAGYVVSLKKSEIAQREVEFLGFNITKEGRGLTDTFKQKLLNITPPKDLKQLQSILGLLNFARNFIPNYSELVKPLYTIVAPANGKFISWTEDNSNQLQHIISVLNQADNLEERNPETRLIIKVNSSPSAGYIRYYNEGSKRPIMYVNYIFSKAEAKFTQTEKLLTTMHKGLIKAMDLAMGQEILVYSPIVSMTKIQRTPLPERKALPVRWITWMTYLEDPRIQFHYDKSLPELQQIPNVTEDVIAKTKHPSEFAMVFYTDGSAIKHPDVNKSHSAGMGIAQVQFIPEYKIVHQWSIPLGDHTAQLAEIAAVEFACKKALKISGPVLIVTDSFYVAESANKELPYWKSNGFLNNKKKPLRHVSKWKSIAECLQLKPDIIIMHEKGHQQPMTTLHTEGNNLADKLATQGSYVVH

SEQ ID NO: 18191 - protein, 751 aa, synthetic construct
MDPLQLLQPLEAEIKGTKLKAHWNSGATITCVPEAFLEDERPIQTMLIKTIHGEKQQDVYYLTFKVQGRKVEAEVLASPYDYILLNPSDVPWLMKKPLQLTVLVPLHEYQERLLQQTALPKEQKELLQKLFLKYDALWQHWENQVGHRRIKPHNIATGTLAPRPQKQYPINPKAKPSIQIVIDDLLKQGVLIQQNSTMNTPVYPVPKPDGKWRMVLDYREVNKTIPLIAAQNQHSAGILSSIYRGKYKTTLDLTNGFWAHPITPESYWLTAFTWQGKQYCWTRLPQGFLNSPALFNADVVDLLKEIPNVQAYVDDIYISHDDPQEHLEQLEKIFSILLNAGYVVSLKKSEIAQREVEFLGFNITKEGRGLTDTFKQKLLNITPPKDLKQLQSILGKLNFARNFIPNYSELVKPLYTIVAPANGKFISWTEDNSNQLQHIISVLNQADNLEERNPETRLIIKVNSSPSAGYIRYYNEGSKRPIMYVNYIFSKAEAKFTQTEKLLTTMHKGLIKAMDLAMGQEILVYSPIVSMTKIQRTPLPERKALPVRWITWMTYLEDPRIQFHYDKSLPELQQIPNVTEDVIAKTKHPSEFAMVFYTDGSAIKHPDVNKSHSAGMGIAQVQFIPEYKIVHQWSIPLGDHTAQLAEIAAVEFACKKALKISGPVLIVTDSFYVAESANKELPYWKSNGFLNNKKKPLRHVSKWKSIAECLQLKPDIIIMHEKGHQQPMTTLHTEGNNLADKLATQGSYVVH

SEQ ID NO: 18192 - protein, 662 aa, Macaque simian foamy virus
VPWLMKKPLQLTVLVPLHEYQERLLQQTALPKEQKELLQKLFLKYDALWQHWENQVGHRRIKPHNIATGTLAPRPQKQYPINPKAKPSIQIVIDDLLKQGVLIQQNSTMNTPVYPVPKPDGKWRMVLDYREVNKTIPLIAAQNQHSAGILSSIYRGKYKTTLDLTNGFWAHPITPESYWLTAFTWQGKQYCWTRLPQGFLNSPALFTADVVDLLKEIPNVQAYVDDIYISHDDPQEHLEQLEKIFSILLNAGYVVSLKKSEIAQREVEFLGFNITKEGRGLTDTFKQKLLNITPPKDLKQLQSILGLLNFARNFIPNYSELVKPLYTIVANANGKFISWTEDNSNQLQHIISVLNQADNLEERNPETRLIIKVNSSPSAGYIRYYNEGSKRPIMYVNYIFSKAEAKFTQTEKLLTTMHKGLIKAMDLAMGQEILVYSPIVSMTKIQRTPLPERKALPVRWITWMTYLEDPRIQFHYDKSLPELQQIPNVTEDVIAKTKHPSEFAMVFYTDGSAIKHPDVNKSHSAGMGIAQVQFIPEYKIVHQWSIPLGDHTAQLAEIAAVEFACKKALKISGPVLIVTDSFYVAESANKELPYWKSNGFLNNKKKPLRHVSKWKSIAECLQLKPDIIIMHEKGHQQPMTTLHTEGNNLADKLATQGSYVVH

SEQ ID NO: 18193 - protein, 662 aa, synthetic construct
VPWLMKKPLQLTVLVPLHEYQERLLQQTALPKEQKELLQKLFLKYDALWQHWENQVGHRRIKPHNIATGTLAPRPQKQYPINPKAKPSIQIVIDDLLKQGVLIQQNSTMNTPVYPVPKPDGKWRMVLDYREVNKTIPLIAAQNQHSAGILSSIYRGKYKTTLDLTNGFWAHPITPESYWLTAFTWQGKQYCWTRLPQGFLNSPALFNADVVDLLKEIPNVQAYVDDIYISHDDPQEHLEQLEKIFSILLNAGYVVSLKKSEIAQREVEFLGFNITKEGRGLTDTFKQKLLNITPPKDLKQLQSILGLLNFARNFIPNYSELVKPLYTIVAPANGKFISWTEDNSNQLQHIISVLNQADNLEERNPETRLIIKVNSSPSAGYIRYYNEGSKRPIMYVNYIFSKAEAKFTQTEKLLTTMHKGLIKAMDLAMGQEILVYSPIVSMTKIQRTPLPERKALPVRWITWMTYLEDPRIQFHYDKSLPELQQIPNVTEDVIAKTKHPSEFAMVFYTDGSAIKHPDVNKSHSAGMGIAQVQFIPEYKIVHQWSIPLGDHTAQLAEIAAVEFACKKALKISGPVLIVTDSFYVAESANKELPYWKSNGFLNNKKKPLRHVSKWKSIAECLQLKPDIIIMHEKGHQQPMTTLHTEGNNLADKLATQGSYVVH

SEQ ID NO: 18194 - protein, 662 aa, synthetic construct
VPWLMKKPLQLTVLVPLHEYQERLLQQTALPKEQKELLQKLFLKYDALWQHWENQVGHRRIKPHNIATGTLAPRPQKQYPINPKAKPSIQIVIDDLLKQGVLIQQNSTMNTPVYPVPKPDGKWRMVLDYREVNKTIPLIAAQNQHSAGILSSIYRGKYKTTLDLTNGFWAHPITPESYWLTAFTWQGKQYCWTRLPQGFLNSPALFNADVVDLLKEIPNVQAYVDDIYISHDDPQEHLEQLEKIFSILLNAGYVVSLKKSEIAQREVEFLGFNITKEGRGLTDTFKQKLLNITPPKDLKQLQSILGKLNFARNFIPNYSELVKPLYTIVAPANGKFISWTEDNSNQLQHIISVLNQADNLEERNPETRLIIKVNSSPSAGYIRYYNEGSKRPIMYVNYIFSKAEAKFTQTEKLLTTMHKGLIKAMDLAMGQEILVYSPIVSMTKIQRTPLPERKALPVRWITWMTYLEDPRIQFHYDKSLPELQQIPNVTEDVIAKTKHPSEFAMVFYTDGSAIKHPDVNKSHSAGMGIAQVQFIPEYKIVHQWSIPLGDHTAQLAEIAAVEFACKKALKISGPVLIVTDSFYVAESANKELPYWKSNGFLNNKKKPLRHVSKWKSIAECLQLKPDIIIMHEKGHQQPMTTLHTEGNNLADKLATQGSYVVH

SEQ ID NO: 18195 - protein, 751 aa, unidentified
MDPLQLLQPLEAEIKGTKLKAHWNSGATITCVPQAFLEEEVPIKNIWIKTIHGEKEQPVYYLTFKIQGRKVEAEVISSPYDYILVSPSDIPWLMKKPLQLTTLVPLQEYEERLLKQTMLTGSYKEKLQSLFLKYDALWQHWENQVGHRRIKPHHIATGTVNPRPQKQYPINPKAKASIQTVINDLLKQGVLIQQNSIMNTPVYPVPKPDGKWRMVLDYREVNKTIPLIAAQNQHSAGILSSIFRGKYKTTLDLSNGFWAHSITPESYWLTAFTWLGQQYCWTRLPQGFLNSPALFTADVVDLLKEVPNVQVYVDDIYISHDDPREHLEQLEKVFSLLLNAGYVVSLKKSEIAQHEVEFLGFNITKEGRGLTETFKQKLLNITPPRDLKQLQSILGLLNFARNFIPNFSELVKPLYNIIATANGKYITWTTDNSQQLQNIISMLNSAENLEERNPEVRLIMKVNTSPSAGYIRFYNEFAKRPIMYLNYVYTKAEVKFTNTEKLLTTIHKGLIKALDLGMGQEILVYSPIVSMTKIQKTPLPERKALPIRWITWMSYLEDPRIQFHYDKTLPELQQVPTVTDDIIAKIKHPSEFSMVFYTDGSAIKHPNVNKSHNAGMGIAQVQFKPEFTVINTWSIPLGDHTAQLAEVAAVEFACKKALKIDGPVLIVTDSFYVAESVNKELPYWQSNGFFNNKKKPLKHVSKWKSIADCIQLKPDIIIIHEKGHQPTASTFHTEGNNLADKLATQGSYVVN

SEQ ID NO: 18196 - protein, 751 aa, synthetic construct
MDPLQLLQPLEAEIKGTKLKAHWNSGATITCVPQAFLEEEVPIKNIWIKTIHGEKEQPVYYLTFKIQGRKVEAEVISSPYDYILVSPSDIPWLMKKPLQLTTLVPLQEYEERLLKQTMLTGSYKEKLQSLFLKYDALWQHWENQVGHRRIKPHHIATGTVNPRPQKQYPINPKAKASIQTVINDLLKQGVLIQQNSIMNTPVYPVPKPDGKWRMVLDYREVNKTIPLIAAQNQHSAGILSSIFRGKYKTTLDLSNGFWAHSITPESYWLTAFTWLGQQYCWTRLPQGFLNSPALFNADVVDLLKEVPNVQVYVDDIYISHDDPREHLEQLEKVFSLLLNAGYVVSLKKSEIAQHEVEFLGFNITKEGRGLTETFKQKLLNITPPRDLKQLQSILGLLNFARNFIPNFSELVKPLYNIIATAPGKYITWTTDNSQQLQNIISMLNSAENLEERNPEVRLIMKVNTSPSAGYIRFYNEFAKRPIMYLNYVYTKAEVKFTNTEKLLTTIHKGLIKALDLGMGQEILVYSPIVSMTKIQKTPLPERKALPIRWITWMSYLEDPRIQFHYDKTLPELQQVPTVTDDIIAKIKHPSEFSMVFYTDGSAIKHPNVNKSHNAGMGIAQVQFKPEFTVINTWSIPLGDHTAQLAEVAAVEFACKKALKIDGPVLIVTDSFYVAESVNKELPYWQSNGFFNNKKKPLKHVSKWKSIADCIQLKPDIIIIHEKGHQPTASTFHTEGNNLADKLATQGSYVVN

SEQ ID NO: 18197 - protein, 751 aa, synthetic construct
MDPLQLLQPLEAEIKGTKLKAHWNSGATITCVPQAFLEEEVPIKNIWIKTIHGEKEQPVYYLTFKIQGRKVEAEVISSPYDYILVSPSDIPWLMKKPLQLTTLVPLQEYEERLLKQTMLTGSYKEKLQSLFLKYDALWQHWENQVGHRRIKPHHIATGTVNPRPQKQYPINPKAKASIQTVINDLLKQGVLIQQNSIMNTPVYPVPKPDGKWRMVLDYREVNKTIPLIAAQNQHSAGILSSIFRGKYKTTLDLSNGFWAHSITPESYWLTAFTWLGQQYCWTRLPQGFLNSPALFNADVVDLLKEVPNVQVYVDDIYISHDDPREHLEQLEKVFSLLLNAGYVVSLKKSEIAQHEVEFLGFNITKEGRGLTETFKQKLLNITPPRDLKQLQSILGKLNFARNFIPNFSELVKPLYNIIATAPGKYITWTTDNSQQLQNIISMLNSAENLEERNPEVRLIMKVNTSPSAGYIRFYNEFAKRPIMYLNYVYTKAEVKFTNTEKLLTTIHKGLIKALDLGMGQEILVYSPIVSMTKIQKTPLPERKALPIRWITWMSYLEDPRIQFHYDKTLPELQQVPTVTDDIIAKIKHPSEFSMVFYTDGSAIKHPNVNKSHNAGMGIAQVQFKPEFTVINTWSIPLGDHTAQLAEVAAVEFACKKALKIDGPVLIVTDSFYVAESVNKELPYWQSNGFFNNKKKPLKHVSKWKSIADCIQLKPDIIIIHEKGHQPTASTFHTEGNNLADKLATQGSYVVN

SEQ ID NO: 18198 - protein, 662 aa, unidentified
IPWLMKKPLQLTTLVPLQEYEERLLKQTMLTGSYKEKLQSLFLKYDALWQHWENQVGHRRIKPHHIATGTVNPRPQKQYPINPKAKASIQTVINDLLKQGVLIQQNSIMNTPVYPVPKPDGKWRMVLDYREVNKTIPLIAAQNQHSAGILSSIFRGKYKTTLDLSNGFWAHSITPESYWLTAFTWLGQQYCWTRLPQGFLNSPALFTADVVDLLKEVPNVQVYVDDIYISHDDPREHLEQLEKVFSLLLNAGYVVSLKKSEIAQHEVEFLGFNITKEGRGLTETFKQKLLNITPPRDLKQLQSILGLLNFARNFIPNFSELVKPLYNIIATANGKYITWTTDNSQQLQNIISMLNSAENLEERNPEVRLIMKVNTSPSAGYIRFYNEFAKRPIMYLNYVYTKAEVKFTNTEKLLTTIHKGLIKALDLGMGQEILVYSPIVSMTKIQKTPLPERKALPIRWITWMSYLEDPRIQFHYDKTLPELQQVPTVTDDIIAKIKHPSEFSMVFYTDGSAIKHPNVNKSHNAGMGIAQVQFKPEFTVINTWSIPLGDHTAQLAEVAAVEFACKKALKIDGPVLIVTDSFYVAESVNKELPYWQSNGFFNNKKKPLKHVSKWKSIADCIQLKPDIIIIHEKGHQPTASTFHTEGNNLADKLATQGSYVVN

SEQ ID NO: 18199 - protein, 662 aa, synthetic construct
IPWLMKKPLQLTTLVPLQEYEERLLKQTMLTGSYKEKLQSLFLKYDALWQHWENQVGHRRIKPHHIATGTVNPRPQKQYPINPKAKASIQTVINDLLKQGVLIQQNSIMNTPVYPVPKPDGKWRMVLDYREVNKTIPLIAAQNQHSAGILSSIFRGKYKTTLDLSNGFWAHSITPESYWLTAFTWLGQQYCWTRLPQGFLNSPALFNADVVDLLKEVPNVQVYVDDIYISHDDPREHLEQLEKVFSLLLNAGYVVSLKKSEIAQHEVEFLGFNITKEGRGLTETFKQKLLNITPPRDLKQLQSILGLLNFARNFIPNFSELVKPLYNIIATAPGKYITWTTDNSQQLQNIISMLNSAENLEERNPEVRLIMKVNTSPSAGYIRFYNEFAKRPIMYLNYVYTKAEVKFTNTEKLLTTIHKGLIKALDLGMGQEILVYSPIVSMTKIQKTPLPERKALPIRWITWMSYLEDPRIQFHYDKTLPELQQVPTVTDDIIAKIKHPSEFSMVFYTDGSAIKHPNVNKSHNAGMGIAQVQFKPEFTVINTWSIPLGDHTAQLAEVAAVEFACKKALKIDGPVLIVTDSFYVAESVNKELPYWQSNGFFNNKKKPLKHVSKWKSIADCIQLKPDIIIIHEKGHQPTASTFHTEGNNLADKLATQGSYVVN

SEQ ID NO: 18200 - protein, 662 aa, synthetic construct
IPWLMKKPLQLTTLVPLQEYEERLLKQTMLTGSYKEKLQSLFLKYDALWQHWENQVGHRRIKPHHIATGTVNPRPQKQYPINPKAKASIQTVINDLLKQGVLIQQNSIMNTPVYPVPKPDGKWRMVLDYREVNKTIPLIAAQNQHSAGILSSIFRGKYKTTLDLSNGFWAHSITPESYWLTAFTWLGQQYCWTRLPQGFLNSPALFNADVVDLLKEVPNVQVYVDDIYISHDDPREHLEQLEKVFSLLLNAGYVVSLKKSEIAQHEVEFLGFNITKEGRGLTETFKQKLLNITPPRDLKQLQSILGKLNFARNFIPNFSELVKPLYNIIATAPGKYITWTTDNSQQLQNIISMLNSAENLEERNPEVRLIMKVNTSPSAGYIRFYNEFAKRPIMYLNYVYTKAEVKFTNTEKLLTTIHKGLIKALDLGMGQEILVYSPIVSMTKIQKTPLPERKALPIRWITWMSYLEDPRIQFHYDKTLPELQQVPTVTDDIIAKIKHPSEFSMVFYTDGSAIKHPNVNKSHNAGMGIAQVQFKPEFTVINTWSIPLGDHTAQLAEVAAVEFACKKALKIDGPVLIVTDSFYVAESVNKELPYWQSNGFFNNKKKPLKHVSKWKSIADCIQLKPDIIIIHEKGHQPTASTFHTEGNNLADKLATQGSYVVN

SEQ ID NO: 18201 - protein, 751 aa, Simian foamy virus
MNPLQLLQPLPAEVKGTKLLAHWNSGATITCIPESFLEDEQPIKQTLIKTIHGEKQQNVYYLTFKVKGRKVEAEVIASPYEYILLSPTDVPWLTQQPLQLTILVPLQEYQDRILNKTALPEEQKQQLKALFTKYDNLWQHWENQVGHRKIRPHNIATGDYPPRPQKQYPINPKAKPSIQIVIDDLLKQGVLTPQNSTMNTPVYPVPKPDGRWRMVLDYREVNKTIPLTAAQNQHSAGILATIVRQKYKTTLDLANGFWAHPITPDSYWLTAFTWQGKQYCWTRLPQGFLNSPALFTADAVDLLKEVPNVQVYVDDIYLSHDNPHEHIQQLEKVFQILLQAGYVVSLKKSEIGQRTVEFLGFNITKEGRGLTDTFKTKLLNVTPPKDLKQLQSILGLLNFARNFIPNFAELVQTLYNLIASSKGKYIEWTEDNTKQLNKVIEALNTASNLEERLPDQRLVIKVNTSPSAGYVRYYNESGKKPIMYLNYVFSKAELKFSMLEKLLTTMHKALIKAMDLAMGQEILVYSPIVSMTKIQKTPLPERKALPIRWITWMTYLEDPRIQFHYDKTLPELKHIPDVYTSSIPPLKHPSQYEGVFCTDGSAIKSPDPTKSNNAGMGIVHAIYNPEYKILNQWSIPLGHHTAQMAEIAAVEFACKKALKVPGPVLVITDSFYVAESANKELPYWKSNGFVNNKKEPLKHISKWKSIAECLSIKPDITIQHEKGHQPINTSIHTEGNALADKLATQGSYVVN

SEQ ID NO: 18202 - protein, 751 aa, synthetic construct
MNPLQLLQPLPAEVKGTKLLAHWNSGATITCIPESFLEDEQPIKQTLIKTIHGEKQQNVYYLTFKVKGRKVEAEVIASPYEYILLSPTDVPWLTQQPLQLTILVPLQEYQDRILNKTALPEEQKQQLKALFTKYDNLWQHWENQVGHRKIRPHNIATGDYPPRPQKQYPINPKAKPSIQIVIDDLLKQGVLTPQNSTMNTPVYPVPKPDGRWRMVLDYREVNKTIPLTAAQNQHSAGILATIVRQKYKTTLDLANGFWAHPITPDSYWLTAFTWQGKQYCWTRLPQGFLNSPALFNADAVDLLKEVPNVQVYVDDIYLSHDNPHEHIQQLEKVFQILLQAGYVVSLKKSEIGQRTVEFLGFNITKEGRGLTDTFKTKLLNVTPPKDLKQLQSILGLLNFARNFIPNFAELVQTLYNLIASSPGKYIEWTEDNTKQLNKVIEALNTASNLEERLPDQRLVIKVNTSPSAGYVRYYNESGKKPIMYLNYVFSKAELKFSMLEKLLTTMHKALIKAMDLAMGQEILVYSPIVSMTKIQKTPLPERKALPIRWITWMTYLEDPRIQFHYDKTLPELKHIPDVYTSSIPPLKHPSQYEGVFCTDGSAIKSPDPTKSNNAGMGIVHAIYNPEYKILNQWSIPLGHHTAQMAEIAAVEFACKKALKVPGPVLVITDSFYVAESANKELPYWKSNGFVNNKKEPLKHISKWKSIAECLSIKPDITIQHEKGHQPINTSIHTEGNALADKLATQGSYVVN

SEQ ID NO: 18203 - protein, 751 aa, synthetic construct
MNPLQLLQPLPAEVKGTKLLAHWNSGATITCIPESFLEDEQPIKQTLIKTIHGEKQQNVYYLTFKVKGRKVEAEVIASPYEYILLSPTDVPWLTQQPLQLTILVPLQEYQDRILNKTALPEEQKQQLKALFTKYDNLWQHWENQVGHRKIRPHNIATGDYPPRPQKQYPINPKAKPSIQIVIDDLLKQGVLTPQNSTMNTPVYPVPKPDGRWRMVLDYREVNKTIPLTAAQNQHSAGILATIVRQKYKTTLDLANGFWAHPITPDSYWLTAFTWQGKQYCWTRLPQGFLNSPALFNADAVDLLKEVPNVQVYVDDIYLSHDNPHEHIQQLEKVFQILLQAGYVVSLKKSEIGQRTVEFLGFNITKEGRGLTDTFKTKLLNVTPPKDLKQLQSILGKLNFARNFIPNFAELVQTLYNLIASSPGKYIEWTEDNTKQLNKVIEALNTASNLEERLPDQRLVIKVNTSPSAGYVRYYNESGKKPIMYLNYVFSKAELKFSMLEKLLTTMHKALIKAMDLAMGQEILVYSPIVSMTKIQKTPLPERKALPIRWITWMTYLEDPRIQFHYDKTLPELKHIPDVYTSSIPPLKHPSQYEGVFCTDGSAIKSPDPTKSNNAGMGIVHAIYNPEYKILNQWSIPLGHHTAQMAEIAAVEFACKKALKVPGPVLVITDSFYVAESANKELPYWKSNGFVNNKKEPLKHISKWKSIAECLSIKPDITIQHEKGHQPINTSIHTEGNALADKLATQGSYVVN

SEQ ID NO: 18204 - protein, 662 aa, Simian foamy virus
VPWLTQQPLQLTILVPLQEYQDRILNKTALPEEQKQQLKALFTKYDNLWQHWENQVGHRKIRPHNIATGDYPPRPQKQYPINPKAKPSIQIVIDDLLKQGVLTPQNSTMNTPVYPVPKPDGRWRMVLDYREVNKTIPLTAAQNQHSAGILATIVRQKYKTTLDLANGFWAHPITPDSYWLTAFTWQGKQYCWTRLPQGFLNSPALFTADAVDLLKEVPNVQVYVDDIYLSHDNPHEHIQQLEKVFQILLQAGYVVSLKKSEIGQRTVEFLGFNITKEGRGLTDTFKTKLLNVTPPKDLKQLQSILGLLNFARNFIPNFAELVQTLYNLIASSKGKYIEWTEDNTKQLNKVIEALNTASNLEERLPDQRLVIKVNTSPSAGYVRYYNESGKKPIMYLNYVFSKAELKFSMLEKLLTTMHKALIKAMDLAMGQEILVYSPIVSMTKIQKTPLPERKALPIRWITWMTYLEDPRIQFHYDKTLPELKHIPDVYTSSIPPLKHPSQYEGVFCTDGSAIKSPDPTKSNNAGMGIVHAIYNPEYKILNQWSIPLGHHTAQMAEIAAVEFACKKALKVPGPVLVITDSFYVAESANKELPYWKSNGFVNNKKEPLKHISKWKSIAECLSIKPDITIQHEKGHQPINTSIHTEGNALADKLATQGSYVVN

SEQ ID NO: 18205 - protein, 662 aa, synthetic construct
VPWLTQQPLQLTILVPLQEYQDRILNKTALPEEQKQQLKALFTKYDNLWQHWENQVGHRKIRPHNIATGDYPPRPQKQYPINPKAKPSIQIVIDDLLKQGVLTPQNSTMNTPVYPVPKPDGRWRMVLDYREVNKTIPLTAAQNQHSAGILATIVRQKYKTTLDLANGFWAHPITPDSYWLTAFTWQGKQYCWTRLPQGFLNSPALFNADAVDLLKEVPNVQVYVDDIYLSHDNPHEHIQQLEKVFQILLQAGYVVSLKKSEIGQRTVEFLGFNITKEGRGLTDTFKTKLLNVTPPKDLKQLQSILGLLNFARNFIPNFAELVQTLYNLIASSPGKYIEWTEDNTKQLNKVIEALNTASNLEERLPDQRLVIKVNTSPSAGYVRYYNESGKKPIMYLNYVFSKAELKFSMLEKLLTTMHKALIKAMDLAMGQEILVYSPIVSMTKIQKTPLPERKALPIRWITWMTYLEDPRIQFHYDKTLPELKHIPDVYTSSIPPLKHPSQYEGVFCTDGSAIKSPDPTKSNNAGMGIVHAIYNPEYKILNQWSIPLGHHTAQMAEIAAVEFACKKALKVPGPVLVITDSFYVAESANKELPYWKSNGFVNNKKEPLKHISKWKSIAECLSIKPDITIQHEKGHQPINTSIHTEGNALADKLATQGSYVVN

SEQ ID NO: 18206 - protein, 662 aa, synthetic construct
VPWLTQQPLQLTILVPLQEYQDRILNKTALPEEQKQQLKALFTKYDNLWQHWENQVGHRKIRPHNIATGDYPPRPQKQYPINPKAKPSIQIVIDDLLKQGVLTPQNSTMNTPVYPVPKPDGRWRMVLDYREVNKTIPLTAAQNQHSAGILATIVRQKYKTTLDLANGFWAHPITPDSYWLTAFTWQGKQYCWTRLPQGFLNSPALFNADAVDLLKEVPNVQVYVDDIYLSHDNPHEHIQQLEKVFQILLQAGYVVSLKKSEIGQRTVEFLGFNITKEGRGLTDTFKTKLLNVTPPKDLKQLQSILGKLNFARNFIPNFAELVQTLYNLIASSPGKYIEWTEDNTKQLNKVIEALNTASNLEERLPDQRLVIKVNTSPSAGYVRYYNESGKKPIMYLNYVFSKAELKFSMLEKLLTTMHKALIKAMDLAMGQEILVYSPIVSMTKIQKTPLPERKALPIRWITWMTYLEDPRIQFHYDKTLPELKHIPDVYTSSIPPLKHPSQYEGVFCTDGSAIKSPDPTKSNNAGMGIVHAIYNPEYKILNQWSIPLGHHTAQMAEIAAVEFACKKALKVPGPVLVITDSFYVAESANKELPYWKSNGFVNNKKEPLKHISKWKSIAECLSIKPDITIQHEKGHQPINTSIHTEGNALADKLATQGSYVVN

SEQ ID NO: 18207 - protein, 592 aa, Squirrel monkey retrovirus
PRSRAIDIPVPHADKISWKITDPVWVDQWPLTYEKTLAAIALVQEQLAAGHIEPTNSPWNTPIFIIKKKSGSWRLLQDLRAVNKVMVPMGALQPGLPSPVAIPLNYHKIVIDLKDCFFTIPLHPEDRPYFAFSVPQINFQSPMPRYQWKVLPQGMANSPTLCQKFVAAAIAPVRSQWPEAYILHYMDDILLACDSAEAAKACYAHIISCLTSYGLKIAPDKVQVSEPFSYLGFELHHQQVFTPRVCLKTDHLKTLNDFQKLLGDIQWLRPYLKLPTSALVPLNNILKGDPNPLSVRALTPEAKQSLALINKAIQNQSVQQISYNLPLVLLLLPTPHTPTAVFWQPNGTDPTKNGSPLLWLHLPASPSKVLLTYPSLLAMLIIKGRYTGRQLFGRDPHSIIIPYTQDQLTWLLQTSDEWAIALSSFTGDIDNHYPSDPVIQFAKLHQFIFPKITKCAPIPQATLVFTDGSSNGIAAYVIDNQPISIKSPYLSAQLVELYAILQVFTVLAHQPFNLYTDSAYIAQSVPLLETVPFIKSSTNATPLFSKLQQLILNRQHPFFIGHLRAHLNLPGPLAEGNALADAATQIFPIISD

SEQ ID NO: 18208 - protein, 592 aa, synthetic construct
PRSRAIDIPVPHADKISWKITDPVWVDQWPLTYEKTLAAIALVQEQLAAGHIEPTNSPWNTPIFIIKKKSGSWRLLQDLRAVNKVMVPMGALQPGLPSPVAIPLNYHKIVIDLKDCFFTIPLHPEDRPYFAFSVPQINFQSPMPRYQWKVLPQGMANSPTLCQKFVAAAIAPVRSQWPEAYILHYMDDILLACDSAEAAKACYAHIISCLTSYGLKIAPDKVQVSEPFSYLGFELHHQQVFTPRVCLKTDHLKTLNDFQKLLGDIQWLRPYLKLPTSALVPLNNILKPDPNPLSVRALTPEAKQSLALINKAIQNQSVQQISYNLPLVLLLLPTPHTPTAVFWQPNGTDPTKNGSPLLWLHLPASPSKVLLTYPSLLAMLIIKGRYTGRQLFGRDPHSIIIPYTQDQLTWLLQTSDEWAIALSSFTGDIDNHYPSDPVIQFAKLHQFIFPKITKCAPIPQATLVFTDGSSNGIAAYVIDNQPISIKSPYLSAQLVELYAILQVFTVLAHQPFNLYTDSAYIAQSVPLLETVPFIKSSTNATPLFSKLQQLILNRQHPFFIGHLRAHLNLPGPLAEGNALADAATQIFPIISD

SEQ ID NO: 18209 - protein, 592 aa, synthetic construct
PRSRAIDIPVPHADKISWKITDPVWVDQWPLTYEKTLAAIALVQEQLAAGHIEPTNSPWNTPIFIIKKKSGSWRLLQDLRAVNKVMVPMGALQPGLPSPVAPPLNYHKIVIDLKDCFFTIPLHPEDRPYFAFSVPQINFQSPMPRYQWKVLPQGMANSPTLCQKFVAAAIAPVRSQWPEAYILHYMDDILLACDSAEAAKACYAHIISCLTSYGLKIAPDKVQVSEPFSYLGFELHHQQVFTPRVCLKTDHLKTLNDFQKLLGDIQWLRPYLKLPTSALVPLNNILKPDPNPLSVRALTPEAKQSLALINKAIQNQSVQQISYNLPLVLLLLPTPHTPTAVFWQPNGTDPTKNGSPLLWLHLPASPSKVLLTYPSLLAMLIIKGRYTGRQLFGRDPHSIIIPYTQDQLTWLLQTSDEWAIALSSFTGDIDNHYPSDPVIQFAKLHQFIFPKITKCAPIPQATLVFTDGSSNGIAAYVIDNQPISIKSPYLSAQLVELYAILQVFTVLAHQPFNLYTDSAYIAQSVPLLETVPFIKSSTNATPLFSKLQQLILNRQHPFFIGHLRAHLNLPGPLAEGNALADAATQIFPIISD

SEQ ID NO: 18210 - protein, 585 aa, unidentified
LATAVDILAPQRYADPITWKSDEPVWVDQWPLTQEKLAAAQQLVQEQLQAGHIIESNSPWNTPIFVIKKKSGKWRLLQDLRAVNATMVLMGALQPGLPSPVAIPQGYFKIVIDLKDCFFTIPLQPVDQKRFAFSLPSTNFKQPMKRYQWKVLPQGMANSPTLCQKYVAAAIEPVRKSWAQMYIIHYMDDILIAGKLGEQVLQCFAQLKQALTTTGLQIAPEKVQLQDPYTYLGFQINGPKITNQKAVIRRDKLQTLNDFQKLLGDINWLRPYLHLTTGDLKPLFDILKGDSNPNSPRSLSEAALASLQKVETAIAEQFVTQIDYTQPLTFLIFNTTLTPTGLFWQNNPVMWVHLPASPKKVLLPYYDAIADLIILGRDNSKKYFGLEPSTIIQPYSKSQIHWLMQNTETWPIACASYAGNIDNHYPPNKLIQFCKLHAVVFPRIISKTPLDNALLVFTDGSSTGIAAYTFEKTTVRFKTSHTSAQLVELQALIAVLSAFPHRALNVYTDSAYLAHSIPLLETVSHIKHISDTAKFFLQCQQLIYNRSIPFYLGHIRAHSGLPGPLSQGNHITDLATKVVATTLTT

SEQ ID NO: 18211 - protein, 585 aa, synthetic construct
LATAVDILAPQRYADPITWKSDEPVWVDQWPLTQEKLAAAQQLVQEQLQAGHIIESNSPWNTPIFVIKKKSGKWRLLQDLRAVNATMVLMGALQPGLPSPVAPPQGYFKIVIDLKDCFFTIPLQPVDQKRFAFSLPSTNFKQPMKRYQWKVLPQGMANSPTLCQKYVAAAIEPVRKSWAQMYIIHYMDDILIAGKLGEQVLQCFAQLKQALTTTGLQIAPEKVQLQDPYTYLGFQINGPKITNQKAVIRRDKLQTLNDFQKLLGDINWLRPYLHLTTGDLKPLFDILKGDSNPNSPRSLSEAALASLQKVETAIAEQFVTQIDYTQPLTFLIFNTTLTPTGLFWQNNPVMWVHLPASPKKVLLPYYDAIADLIILGRDNSKKYFGLEPSTIIQPYSKSQIHWLMQNTETWPIACASYAGNIDNHYPPNKLIQFCKLHAVVFPRIISKTPLDNALLVFTDGSSTGIAAYTFEKTTVRFKTSHTSAQLVELQALIAVLSAFPHRALNVYTDSAYLAHSIPLLETVSHIKHISDTAKFFLQCQQLIYNRSIPFYLGHIRAHSGLPGPLSQGNHITDLATKVVATTLTT

SEQ ID NO: 18212 - protein, 650 aa, Walleye dermal sarcoma virus
SCQTKNTLNIDEYLLQFPDQLWASLPTDIGRMLVPPITIKIKDNASLPSIRQYPLPKDKTEGLRPLISSLENQGILIKCHSPCNTPIFPIKKAGRDEYRMIHDLRAINNIVAPLTAVVASPTTVLSNLAPSLHWFTVIDLSNAFFSVPIHKDSQYLFAFTFEGHQYTWTVLPQGFIHSPTLFSQALYQSLHKIKFKISSEICIYMDDVLIASKDRDTNLKDTAVMLQHLASEGHKVSKKKLQLCQQEVVYLGQLLTPEGRKILPDRKVTVSQFQQPTTIRQIRAFLGLVGYCRHWIPEFSIHSKFLEKQLKKDTAEPFQLDDQQVEAFNKLKHAITTAPVLVVPDPAKPFQLYTSHSEHASIAVLTQKHAGRTRPIAFLSSKFDAIESGLPPCLKACASIHRSLTQADSFILGAPLIIYTTHAICTLLQRDRSQLVTASRFSKWEADLLRPELTFVACSAVSPAHLYMQSCENNIPPHDCVLLTHTISRPRPDLSDLPIPDPDMTLFSDGSYTTGRGGAAVVMHRPVTDDFIIIHQQPGGASAQTAELLALAAACHLATDKTVNIYTDSRYAYGVVHDFGHLWMHRGFVTSAGTPIKNHKEIEYLLKQIMKPKQVSVIKIEAHTKGVSMEVRGNAAADEAAKNAVFLVQR

SEQ ID NO: 18213 - protein, 650 aa, synthetic construct
SCQTKNTLNIDEYLLQFPDQLWASLPTDIGRMLVPPITIKIKDNASLPSIRQYPLPKDKTEGLRPLISSLENQGILIKCHSPCNTPIFPIKKAGRDEYRMIHDLRAINNIVAPLTAVVASPTTVLSNLAPSLHWFTVIDLSNAFFSVPIHKDSQYLFAFTFEGHQYTWTVLPQGFIHSPTLFNQALYQSLHKIKFKISSEICIYMDDVLIASKDRDTNLKDTAVMLQHLASEGHKVSKKKLQLCQQEVVYLGQLLTPEGRKILPDRKVTVSQFQQPTTIRQIRAFLGLVGYCRHWIPEFSIHSKFLEKQLKPDTAEPFQLDDQQVEAFNKLKHAITTAPVLVVPDPAKPFQLYTSHSEHASIAVLTQKHAGRTRPIAFLSSKFDAIESGLPPCLKACASIHRSLTQADSFILGAPLIIYTTHAICTLLQRDRSQLVTASRFSKWEADLLRPELTFVACSAVSPAHLYMQSCENNIPPHDCVLLTHTISRPRPDLSDLPIPDPDMTLFSDGSYTTGRGGAAVVMHRPVTDDFIIIHQQPGGASAQTAELLALAAACHLATDKTVNIYTDSRYAYGVVHDFGHLWMHRGFVTSAGTPIKNHKEIEYLLKQIMKPKQVSVIKIEAHTKGVSMEVRGNAAADEAAKNAVFLVQR

SEQ ID NO: 18214 - protein, 650 aa, synthetic construct
SCQTKNTLNIDEYLLQFPDQLWASLPTDIGRMLVPPITIKIKDNASLPSIRQYPLPKDKTEGLRPLISSLENQGILIKCHSPCNTPIFPIKKAGRDEYRMIHDLRAINNIVAPLTAVVASPTTVLSNLAPSLHWFTVIDLSNAFFSVPIHKDSQYLFAFTFEGHQYTWTVLPQGFIHSPTLFNQALYQSLHKIKFKISSEICIYMDDVLIASKDRDTNLKDTAVMLQHLASEGHKVSKKKLQLCQQEVVYLGQLLTPEGRKILPDRKVTVSQFQQPTTIRQIRAFLGKVGYCRHFIPEFSIHSKFLEKQLKPDTAEPFQLDDQQVEAFNKLKHAITTAPVLVVPDPAKPFQLYTSHSEHASIAVLTQKHAGRTRPIAFLSSKFDAIESGLPPCLKACASIHRSLTQADSFILGAPLIIYTTHAICTLLQRDRSQLVTASRFSKWEADLLRPELTFVACSAVSPAHLYMQSCENNIPPHDCVLLTHTISRPRPDLSDLPIPDPDMTLFSDGSYTTGRGGAAVVMHRPVTDDFIIIHQQPGGASAQTAELLALAAACHLATDKTVNIYTDSRYAYGVVHDFGHLWMHRGFVTSAGTPIKNHKEIEYLLKQIMKPKQVSVIKIEAHTKGVSMEVRGNAAADEAAKNAVFLVQR

SEQ ID NO: 18215 - protein, 669 aa, Woolly monkey sarcoma virus
VLNLEEEYRLHEKPVPSSIDPSWLQLFPTVWAERAGMGLANQVPPVVVELRSGASPVAVRQYPMSKEAREGIRPHIQRFLDLGVLVPCQSPWNTPLLPVKKPGTNDYRPVQDLREINKRVQDIHPTVPNPYNLLSSLPPSHTWYSVLDLKDAFFCLKLHPNSQPLFAFEWRDPEKGNTGQLTWTRLPQGFKNSPTLFDEALHRDLAPFRALNPQVVLLQYVDDLLVAAPTYRDCKEGTQKLLQELSKLGYRVSAKKAQLCQKEVTYLGYLLKEGKRWLTPARKATVMKIPPPTTPRQVREFLGTAGFCRLWIPGFASLAAPLYPLTKESIPFIWTEEHQKAFDRIKEALLSAPALALPDLTKPFTLYVDERAGVARGVLTQTLGPWRRPVAYLSKKLDPVASGWPTCLKAVAAVALLLKDADKLTLGQNVTVIASHSLESIVRQPPDRWMTNARMTHYQSLLLNERVSFAPPAVLNPATLLPVESEATPVHRCSEILAEETGTRRDLKDQPLPGVPAWYTDGSSFIAEGKRRAGAAIVDGKRTVWASSLPEGTSAQKAELVALTQALRLAEGKDINIYTDSRYAFATAHIHGAIYKQRGLLTSAGKDIKNKEEILALLEAIHLPKRVAIIHCPGHQKGNDPVATGNRRADEAAKQAALSTRVLAETTKP

SEQ ID NO: 18216 - protein, 669 aa, synthetic construct
VLNLEEEYRLHEKPVPSSIDPSWLQLFPTVWAERAGMGLANQVPPVVVELRSGASPVAVRQYPMSKEAREGIRPHIQRFLDLGVLVPCQSPWNTPLLPVKKPGTNDYRPVQDLREINKRVQDIHPTVPNPYNLLSSLPPSHTWYSVLDLKDAFFCLKLHPNSQPLFAFEWRDPEKGNTGQLTWTRLPQGFKNSPTLFNEALHRDLAPFRALNPQVVLLQYVDDLLVAAPTYRDCKEGTQKLLQELSKLGYRVSAKKAQLCQKEVTYLGYLLKEGKRWLTPARKATVMKIPPPTTPRQVREFLGTAGFCRLWIPGFASLAAPLYPLTKPSIPFIWTEEHQKAFDRIKEALLSAPALALPDLTKPFTLYVDERAGVARGVLTQTLGPWRRPVAYLSKKLDPVASGWPTCLKAVAAVALLLKDADKLTLGQNVTVIASHSLESIVRQPPDRWMTNARMTHYQSLLLNERVSFAPPAVLNPATLLPVESEATPVHRCSEILAEETGTRRDLKDQPLPGVPAWYTDGSSFIAEGKRRAGAAIVDGKRTVWASSLPEGTSAQKAELVALTQALRLAEGKDINIYTDSRYAFATAHIHGAIYKQRGWLTSAGKDIKNKEEILALLEAIHLPKRVAIIHCPGHQKGNDPVATGNRRADEAAKQAALSTRVLAETTKP

SEQ ID NO: 18217 - protein, 669 aa, synthetic construct
VLNLEEEYRLHEKPVPSSIDPSWLQLFPTVWAERAGMGLANQVPPVVVELRSGASPVAVRQYPMSKEAREGIRPHIQRFLDLGVLVPCQSPWNTPLLPVKKPGTNDYRPVQDLREINKRVQDIHPTVPNPYNLLSSLPPSHTWYSVLDLKDAFFCLKLHPNSQPLFAFEWRDPEKGNTGQLTWTRLPQGFKNSPTLFNEALHRDLAPFRALNPQVVLLQYVDDLLVAAPTYRDCKEGTQKLLQELSKLGYRVSAKKAQLCQKEVTYLGYLLKEGKRWLTPARKATVMKIPPPTTPRQVREFLGKAGFCRLFIPGFASLAAPLYPLTKPSIPFIWTEEHQKAFDRIKEALLSAPALALPDLTKPFTLYVDERAGVARGVLTQTLGPWRRPVAYLSKKLDPVASGWPTCLKAVAAVALLLKDADKLTLGQNVTVIASHSLESIVRQPPDRWMTNARMTHYQSLLLNERVSFAPPAVLNPATLLPVESEATPVHRCSEILAEETGTRRDLKDQPLPGVPAWYTDGSSFIAEGKRRAGAAIVDGKRTVWASSLPEGTSAQKAELVALTQALRLAEGKDINIYTDSRYAFATAHIHGAIYKQRGWLTSAGKDIKNKEEILALLEAIHLPKRVAIIHCPGHQKGNDPVATGNRRADEAAKQAALSTRVLAETTKP

SEQ ID NO: 18218 - protein, 671 aa, unidentified
TLNIEDEYRLHETSKEPDVPLGSTWLSDFPQAWAETGGMGLAVRQAPLIIPLKATSTPVSIKQYPMSQEARLGIKPHIQRLLDQGILVPCQSPWNTPLLPVKKPGTNDYRPVQDLREVNKRVEDIHPTVPNPYNLLSGLPPSHQWYTVLDLKDAFFCLRLHPTSQPLFAFEWRDPEMGISGQLTWTRLPQGFKNSPTLFDEALHRDLADFRIQHPDLILLQYVDDLLLAATSEQDCQRGTRALLQTLGNLGYRASAKKAQICQKQVKYLGYLLKEGQRWLTEARKETVMGQPTPKTPRQLREFLGTAGFCRLWIPGFAEMAAPLYPLTKTGTLFNWGPDQQKAYQEIKQALLTAPALGLPDLTKPFELFVDEKQGYAKGVLTQKLGPWRRPVAYLSKKLDPVAAGWPPCLRMVAAIAVLTKDAGKLTMGQPLVILAPHAVEALVKQPPDRWLSNARMTHYQAMLLDTDRVQFGPVVALNPATLLPLPEKEAPHDCLEILAETHGTRPDLTDQPIPDADYTWYTDGSSFLQEGQRRAGAAVTTETEVIWARALPAGTSAQRAELIALTQALKMAEGKKLNVYTDSRYAFATAHVHGEIYRRRGLLTSEGREIKNKNEILALLKALFLPKRLSIIHCPGHQKGNSAEARGNRMADQAAREAAMKAVLETSTLL

SEQ ID NO: 18219 - protein, 671 aa, synthetic construct
TLNIEDEYRLHETSKEPDVPLGSTWLSDFPQAWAETGGMGLAVRQAPLIIPLKATSTPVSIKQYPMSQEARLGIKPHIQRLLDQGILVPCQSPWNTPLLPVKKPGTNDYRPVQDLREVNKRVEDIHPTVPNPYNLLSGLPPSHQWYTVLDLKDAFFCLRLHPTSQPLFAFEWRDPEMGISGQLTWTRLPQGFKNSPTLFNEALHRDLADFRIQHPDLILLQYVDDLLLAATSEQDCQRGTRALLQTLGNLGYRASAKKAQICQKQVKYLGYLLKEGQRWLTEARKETVMGQPTPKTPRQLREFLGTAGFCRLWIPGFAEMAAPLYPLTKPGTLFNWGPDQQKAYQEIKQALLTAPALGLPDLTKPFELFVDEKQGYAKGVLTQKLGPWRRPVAYLSKKLDPVAAGWPPCLRMVAAIAVLTKDAGKLTMGQPLVILAPHAVEALVKQPPDRWLSNARMTHYQAMLLDTDRVQFGPVVALNPATLLPLPEKEAPHDCLEILAETHGTRPDLTDQPIPDADYTWYTDGSSFLQEGQRRAGAAVTTETEVIWARALPAGTSAQRAELIALTQALKMAEGKKLNVYTDSRYAFATAHVHGEIYRRRGWLTSEGREIKNKNEILALLKALFLPKRLSIIHCPGHQKGNSAEARGNRMADQAAREAAMKAVLETSTLL

SEQ ID NO: 18220 - protein, 671 aa, synthetic construct
TLNIEDEYRLHETSKEPDVPLGSTWLSDFPQAWAETGGMGLAVRQAPLIIPLKATSTPVSIKQYPMSQEARLGIKPHIQRLLDQGILVPCQSPWNTPLLPVKKPGTNDYRPVQDLREVNKRVEDIHPTVPNPYNLLSGLPPSHQWYTVLDLKDAFFCLRLHPTSQPLFAFEWRDPEMGISGQLTWTRLPQGFKNSPTLFNEALHRDLADFRIQHPDLILLQYVDDLLLAATSEQDCQRGTRALLQTLGNLGYRASAKKAQICQKQVKYLGYLLKEGQRWLTEARKETVMGQPTPKTPRQLREFLGKAGFCRLFIPGFAEMAAPLYPLTKPGTLFNWGPDQQKAYQEIKQALLTAPALGLPDLTKPFELFVDEKQGYAKGVLTQKLGPWRRPVAYLSKKLDPVAAGWPPCLRMVAAIAVLTKDAGKLTMGQPLVILAPHAVEALVKQPPDRWLSNARMTHYQAMLLDTDRVQFGPVVALNPATLLPLPEKEAPHDCLEILAETHGTRPDLTDQPIPDADYTWYTDGSSFLQEGQRRAGAAVTTETEVIWARALPAGTSAQRAELIALTQALKMAEGKKLNVYTDSRYAFATAHVHGEIYRRRGWLTSEGREIKNKNEILALLKALFLPKRLSIIHCPGHQKGNSAEARGNRMADQAAREAAMKAVLETSTLL

SEQ ID NO: 18221 - protein, 9 aa, unidentified
LAGLIDADG

SEQ ID NO: 18222 - protein, 1082 aa, Neisseria meningitidis
MAAFKPNPINYILGLDIGIASVGWAMVEIDEEENPIRLIDLGVRVFERAEVPKTGDSLAMARRLARSVRRLTRRRAHRLLRARRLLKREGVLQAADFDENGLIKSLPNTPWQLRAAALDRKLTPLEWSAVLLHLIKHRGYLSQRKNEGETADKELGALLKGVANNAHALQTGDFRTPAELALNKFEKESGHIRNQRGDYSHTFSRKDLQAELILLFEKQKEFGNPHVSGGLKEGIETLLMTQRPALSGDAVQKMLGHCTFEPAEPKAAKNTYTAERFIWLTKLNNLRILEQGSERPLTDTERATLMDEPYRKSKLTYAQARKLLGLEDTAFFKGLRYGKDNAEASTLMEMKAYHAISRALEKEGLKDKKSPLNLSSELQDEIGTAFSLFKTDEDITGRLKDRVQPEILEALLKHISFDKFVQISLKALRRIVPLMEQGKRYDEACAEIYGDHYGKKNTEEKIYLPPIPADEIRNPVVLRALSQARKVINGVVRRYGSPARIHIETAREVGKSFKDRKEIEKRQEENRKDREKAAAKFREYFPNFVGEPKSKDILKLRLYEQQHGKCLYSGKEINLVRLNEKGYVEIDHALPFSRTWDDSFNNKVLVLGSENQNKGNQTPYEYFNGKDNSREWQEFKARVETSRFPRSKKQRILLQKFDEDGFKECNLNDTRYVNRFLCQFVADHILLTGKGKRRVFASNGQITNLLRGFWGLRKVRAENDRHHALDAVVVACSTVAMQQKITRFVRYKEMNAFDGKTIDKETGKVLHQKTHFPQPWEFFAQEVMIRVFGKPDGKPEFEEADTPEKLRTLLAEKLSSRPEAVHEYVTPLFVSRAPNRKMSGAHKDTLRSAKRFVKHNEKISVKRVWLTEIKLADLENMVNYKNGREIELYEALKARLEAYGGNAKQAFDPKDNPFYKKGGQLVKAVRVEKTQESGVLLNKKNAYTIADNGDMVRVDVFCKVDKKGKNQYFIVPIYAWQVAENILPDIDCKGYRIDDSYTFCFSLHKYDLIAFQKDEKSKVEFAYYINCDSSNGRFYLAWHDKGSKEQQFRISTQNLVLIQKYQVNELGKEIRPCRLKKRPPVR

SEQ ID NO: 18223 - protein, 1055 aa, Pasteurella pneumotropica
MQNNPLNYILGLDLGIASIGWAVVEIDEESSPIRLIDVGVRTFERAEVAKTGESLALSRRLARSSRRLIKRRAERLKKAKRLLKAEKILHSIDEKLPINVWQLRVKGLKEKLERQEWAAVLLHLSKHRGYLSQRKNEGKSDNKELGALLSGIASNHQMLQSSEYRTPAEIAVKKFQVEEGHIRNQRGSYTHTFSRLDLLAEMELLFQRQAELGNSYTSTTLLENLTALLMWQKPALAGDAILKMLGKCTFEPSEYKAAKNSYSAERFVWLTKLNNLRILENGTERALNDNERFALLEQPYEKSKLTYAQVRAMLALSDNAIFKGVRYLGEDKKTVESKTTLIEMKFYHQIRKTLGSAELKKEWNELKGNSDLLDEIGTAFSLYKTDDDICRYLEGKLPERVLNALLENLNFDKFIQLSLKALHQILPLMLQGQRYDEAVSAIYGDHYGKKSTETTRLLPTIPADEIRNPVVLRTLTQARKVINAVVRLYGSPARIHIETAREVGKSYQDRKKLEKQQEDNRKQRESAVKKFKEMFPHFVGEPKGKDILKMRLYELQQAKCLYSGKSLELHRLLEKGYVEVDHALPFSRTWDDSFNNKVLVLANENQNKGNLTPYEWLDGKNNSERWQHFVVRVQTSGFSYAKKQRILNHKLDEKGFIERNLNDTRYVARFLCNFIADNMLLVGKGKRNVFASNGQITALLRHRWGLQKVREQNDRHHALDAVVVACSTVAMQQKITRFVRYNEGNVFSGERIDRETGEIIPLHFPSPWAFFKENVEIRIFSENPKLELENRLPDYPQYNHEWVQPLFVSRMPTRKMTGQGHMETVKSAKRLNEGLSVLKVPLTQLKLSDLERMVNRDREIALYESLKARLEQFGNDPAKAFAEPFYKKGGALVKAVRLEQTQKSGVLVRDGNGVADNASMVRVDVFTKGGKYFLVPIYTWQVAKGILPNRAATQGKDENDWDIMDEMATFQFSLCQNDLIKLVTKKKTIFGYFNGLNRATSNINIKEHDLDKSKGKLGIYLEVGVKLAISLEKYQVDELGKNIRPCRPTKRQHVR

SEQ ID NO: 18224 - protein, 1053 aa, Staphylococcus aureus
MKRNYILGLDIGITSVGYGIIDYETRDVIDAGVRLFKEANVENNEGRRSKRGARRLKRRRRHRIQRVKKLLFDYNLLTDHSELSGINPYEARVKGLSQKLSEEEFSAALLHLAKRRGVHNVNEVEEDTGNELSTKEQISRNSKALEEKYVAELQLERLKKDGEVRGSINRFKTSDYVKEAKQLLKVQKAYHQLDQSFIDTYIDLLETRRTYYEGPGEGSPFGWKDIKEWYEMLMGHCTYFPEELRSVKYAYNADLYNALNDLNNLVITRDENEKLEYYEKFQIIENVFKQKKKPTLKQIAKEILVNEEDIKGYRVTSTGKPEFTNLKVYHDIKDITARKEIIENAELLDQIAKILTIYQSSEDIQEELTNLNSELTQEEIEQISNLKGYTGTHNLSLKAINLILDELWHTNDNQIAIFNRLKLVPKKVDLSQQKEIPTTLVDDFILSPVVKRSFIQSIKVINAIIKKYGLPNDIIIELAREKNSKDAQKMINEMQKRNRQTNERIEEIIRTTGKENAKYLIEKIKLHDMQEGKCLYSLEAIPLEDLLNNPFNYEVDHIIPRSVSFDNSFNNKVLVKQEENSKKGNRTPFQYLSSSDSKISYETFKKHILNLAKGKGRISKTKKEYLLEERDINRFSVQKDFINRNLVDTRYATRGLMNLLRSYFRVNNLDVKVKSINGGFTSFLRRKWKFKKERNKGYKHHAEDALIIANADFIFKEWKKLDKAKKVMENQMFEEKQAESMPEIETEQEYKEIFITPHQIKHIKDFKDYKYSHRVDKKPNRELINDTLYSTRKDDKGNTLIVNNLNGLYDKDNDKLKKLINKSPEKLLMYHHDPQTYQKLKLIMEQYGDEKNPLYKYYEETGNYLTKYSKKDNGPVIKKIKYYGNKLNAHLDITDDYPNSRNKVVKLSLKPYRFDVYLDNGVYKFVTVKNLDVIKKENYYEVNSKCYEEAKKLKKISNQAEFIASFYNNDLIKINGELYRVIGVNNDLLNRIEVNMIDITYREYLENMNDKRPPRIIKTIASKTQSIKKYSTDILGNLYEVKSKKHPQIIKKG

SEQ ID NO: 18225 - protein, 1053 aa, Staphylococcus aureus
MKRNYILGLDIGITSVGYGIIDYETRDVIDAGVRLFKEANVENNEGRRSKRGARRLKRRRRHRIQRVKKLLFDYNLLTDHSELSGINPYEARVKGLSQKLSEEEFSAALLHLAKRRGVHNVNEVEEDTGNELSTKEQISRNSKALEEKYVAELQLERLKKDGEVRGSINRFKTSDYVKEAKQLLKVQKAYHQLDQSFIDTYIDLLETRRTYYEGPGEGSPFGWKDIKEWYEMLMGHCTYFPEELRSVKYAYNADLYNALNDLNNLVITRDENEKLEYYEKFQIIENVFKQKKKPTLKQIAKEILVNEEDIKGYRVTSTGKPEFTNLKVYHDIKDITARKEIIENAELLDQIAKILTIYQSSEDIQEELTNLNSELTQEEIEQISNLKGYTGTHNLSLKAINLILDELWHTNDNQIAIFNRLKLVPKKVDLSQQKEIPTTLVDDFILSPVVKRSFIQSIKVINAIIKKYGLPNDIIIELAREKNSKDAQKMINEMQKRNRQTNERIEEIIRTTGKENAKYLIEKIKLHDMQEGKCLYSLEAIPLEDLLNNPFNYEVDHIIPRSVSFDNSFNNKVLVKQEENSKKGNRTPFQYLSSSDSKISYETFKKHILNLAKGKGRISKTKKEYLLEERDINRFSVQKDFINRNLVDTRYATRGLMNLLRSYFRVNNLDVKVKSINGGFTSFLRRKWKFKKERNKGYKHHAEDALIIANADFIFKEWKKLDKAKKVMENQMFEEKQAESMPEIETEQEYKEIFITPHQIKHIKDFKDYKYSHRVDKKPNRKLINDTLYSTRKDDKGNTLIVNNLNGLYDKDNDKLKKLINKSPEKLLMYHHDPQTYQKLKLIMEQYGDEKNPLYKYYEETGNYLTKYSKKDNGPVIKKIKYYGNKLNAHLDITDDYPNSRNKVVKLSLKPYRFDVYLDNGVYKFVTVKNLDVIKKENYYEVNSKCYEEAKKLKKISNQAEFIASFYKNDLIKINGELYRVIGVNNDLLNRIEVNMIDITYREYLENMNDKRPPHIIKTIASKTQSIKKYSTDILGNLYEVKSKKHPQIIKKG

SEQ ID NO: 18226 - protein, 1061 aa, Staphylococcus auricularis
MQENQQKQNYILGLDIGITSVGYGLIDSKTREVIDAGVRLFPEADSENNSNRRSKRGARRLKRRRIHRLNRVKDLLADYQMIDLNNVPKSTDPYTIRVKGLREPLTKEEFAIALLHIAKRRGLHNISVSMGDEEQDNELSTKQQLQKNAQQLQDKYVCELQLERLTNINKVRGEKNRFKTEDFVKEVKQLCETQRQYHNIDDQFIQQYIDLVSTRREYFEGPGNGSPYGWDGDLLKWYEKLMGRCTYFPEELRSVKYAYSADLFNALNDLNNLVVTRDDNPKLEYYEKYHIIENVFKQKKNPTLKQIAKEIGVQDYDIRGYRITKSGKPQFTSFKLYHDLKNIFEQAKYLEDVEMLDEIAKILTIYQDEISIKKALDQLPELLTESEKSQIAQLTGYTGTHRLSLKCIHIVIDELWESPENQMEIFTRLNLKPKKVEMSEIDSIPTTLVDEFILSPVVKRAFIQSIKVINAVINRFGLPEDIIIELAREKNSKDRRKFINKLQKQNEATRKKIEQLLAKYGNTNAKYMIEKIKLHDMQEGKCLYSLEAIPLEDLLSNPTHYEVDHIIPRSVSFDNSLNNKVLVKQSENSKKGNRTPYQYLSSNESKISYNQFKQHILNLSKAKDRISKKKRDMLLEERDINKFEVQKEFINRNLVDTRYATRELSNLLKTYFSTHDYAVKVKTINGGFTNHLRKVWDFKKHRNHGYKHHAEDALVIANADFLFKTHKALRRTDKILEQPGLEVNDTTVKVDTEEKYQELFETPKQVKNIKQFRDFKYSHRVDKKPNRQLINDTLYSTREIDGETYVVQTLKDLYAKDNEKVKKLFTERPQKILMYQHDPKTFEKLMTILNQYAEAKNPLAAYYEDKGEYVTKYAKKGNGPAIHKIKYIDKKLGSYLDVSNKYPETQNKLVKLSLKSFRFDIYKCEQGYKMVSIGYLDVLKKDNYYYIPKDKYEAEKQKKKIKESDLFVGSFYYNDLIMYEDELFRVIGVNSDINNLVELNMVDITYKDFCEVNNVTGEKRIKKTIGKRVVLIEKYTTDILGNLYKTPLPKKPQLIFKRGEL

SEQ ID NO: 18227 - protein, 1061 aa, Staphylococcus auricularis
MQENQQKQNYILGLDIGITSVGYGLIDSKTREVIDAGVRLFPEADSENNSNRRSKRGARRLKRRRIHRLNRVKDLLADYQMIDLNNVPKSTDPYTIRVKGLREPLTKEEFAIALLHIAKRRGLHNISVSMGDEEQDNELSTKQQLQKNAQQLQDKYVCELQLERLTNINKVRGEKNRFKTEDFVKEVKQLCETQRQYHNIDDQFIQQYIDLVSTRREYFEGPGNGSPYGWDGDLLKWYEKLMGRCTYFPEELRSVKYAYSADLFNALNDLNNLVVTRDDNPKLEYYEKYHIIENVFKQKKNPTLKQIAKEIGVQDYDIRGYRITKSGKPQFTSFKLYHDLKNIFEQAKYLEDVEMLDEIAKILTIYQDEISIKKALDQLPELLTESEKSQIAQLTGYTGTHRLSLKCIHIVIDELWESPENQMEIFTRLNLKPKKVEMSEIDSIPTTLVDEFILSPVVKRAFIQSIKVINAVINRFGLPEDIIIELAREKNSKDRRKFINKLQKQNEATRKKIEQLLAKYGNTNAKYMIEKIKLHDMQEGKCLYSLEAIPLEDLLSNPTHYEVDHIIPRSVSFDNSLNNKVLVKQSENSKKGNRTPYQYLSSNESKISYNQFKQHILNLSKAKDRISKKKRDMLLEERDINKFEVQKEFINRNLVDTRYATRELSNLLKTYFSTHDYAVKVKTINGGFTNHLRKVWDFKKHRNHGYKHHAEDALVIANADFLFKTHKALRRTDKILEQPGLEVNDTTVKVDTEEKYQELFETPKQVKNIKQFRDFKYSHRVDKKPNRKLINDTLYSTREIDGETYVVQTLKDLYAKDNEKVKKLFTERPQKILMYQHDPKTFEKLMTILNQYAEAKNPLAAYYEDKGEYVTKYAKKGNGPAIHKIKYIDKKLGSYLDVSNKYPETQNKLVKLSLKSFRFDIYKCEQGYKMVSIGYLDVLKKDNYYYIPKDKYEAEKQKKKIKESDLFVGSFYKNDLIMYEDELFRVIGVNSDINNLVELNMVDITYKDFCEVNNVTGEKHIKKTIGKRVVLIEKYTTDILGNLYKTPLPKKPQLIFKRGEL

SEQ ID NO: 18228 - protein, 1375 aa, Streptococcus canis
MEKKYSIGLDIGTNSVGWAVITDDYKVPSKKFKVLGNTNRKSIKKNLMGALLFDSGETAEATRLKRTARRRYTRRKNRIRYLQEIFANEMAKLDDSFFQRLEESFLVEEDKKNERHPIFGNLADEVAYHRNYPTIYHLRKKLADSPEKADLRLIYLALAHIIKFRGHFLIEGKLNAENSDVAKLFYQLIQTYNQLFEESPLDEIEVDAKGILSARLSKSKRLEKLIAVFPNEKKNGLFGNIIALALGLTPNFKSNFDLTEDAKLQLSKDTYDDDLDELLGQIGDQYADLFSAAKNLSDAILLSDILRSNSEVTKAPLSASMVKRYDEHHQDLALLKTLVRQQFPEKYAEIFKDDTKNGYAGYVGADKKLRKRSGKLATEEEFYKFIKPILEKMDGAEELLAKLNRDDLLRKQRTFDNGSIPHQIHLKELHAILRRQEEFYPFLKENREKIEKILTFRIPYYVGPLARGNSRFAWLTRKSEEAITPWNFEEVVDKGASAQSFIERMTNFDEQLPNKKVLPKHSLLYEYFTVYNELTKVKYVTERMRKPEFLSGEQKKAIVDLLFKTNRKVTVKQLKEDYFKKIECFDSVEIIGVEDRFNASLGTYHDLLKIIKDKDFLDNEENEDILEDIVLTLTLFEDREMIEERLKTYAHLFDDKVMKQLKRRHYTGWGRLSRKMINGIRDKQSGKTILDFLKSDGFSNRNFMQLIHDDSLTFKEEIEKAQVSGQGDSLHEQIADLAGSPAIKKGILQTVKIVDELVKVMGHKPENIVIEMARENQTTTKGLQQSRERKKRIEEGIKELESQILKENPVENTQLQNEKLYLYYLQNGRDMYVDQELDINRLSDYDVDHIVPQSFIKDDSIDNKVLTRSVENRGKSDNVPSEEVVKKMKNYWRQLLNAKLITQRKFDNLTKAERGGLSEADKAGFIKRQLVETRQITKHVARILDSRMNTKRDKNDKPIREVKVITLKSKLVSDFRKDFQLYKVRDINNYHHAHDAYLNAVVGTALIKKYPKLESEFVYGDYKVYDVRKMIAKSEQEIGKATAKRFFYSNIMNFFKTEVKLANGEIRKRPLIETNGETGEVVWNKEKDFATVRKVLAMPQVNIVKKTEVQTGGFSKESILSKRESAKLIPRKKGWDTRKYGGFGSPTVAYSILVVAKVEKGKAKKLKSVKVLVGITIMEKGSYEKDPIGFLEAKGYKDIKKELIFKLPKYSLFELENGRRRMLASAKELQKANELVLPQHLVRLLYYTQNISATTGSNNLGYIEQHREEFKEIFEKIIDFSEKYILKNKVNSNLKSSFDEQFAVSDSILLSNSFVSLLKYTSFGASGGFTFLDLDVKQGRLRYQTVTEVLDATLIYQSITGLYETRTDLSQLGGD

SEQ ID NO: 18229 - protein, 1368 aa, Streptococcus pyogenes [sequence omitted]

SEQ ID NO: 18230 - protein, 1368 aa, Streptococcus pyogenes
MDKKYSIGLDIGTNSVGWAVITDEYKVPSKKFKVLGNTDRHSIKKNLIGALLFDSGETAEATRLKRTARRRYTRRKNRICYLQEIFSNEMAKVDDSFFHRLEESFLVEEDKKHERHPIFGNIVDEVAYHEKYPTIYHLRKKLVDSTDKADLRLIYLALAHMIKFRGHFLIEGDLNPDNSDVDKLFIQLVQTYNQLFEENPINASGVDAKAILSARLSKSRRLENLIAQLPGEKKNGLFGNLIALSLGLTPNFKSNFDLAEDAKLQLSKDTYDDDLDNLLAQIGDQYADLFLAAKNLSDAILLSDILRVNTEITKAPLSASMIKRYDEHHQDLTLLKALVRQQLPEKYKEIFFDQSKNGYAGYIDGGASQEEFYKFIKPILEKMDGTEELLVKLNREDLLRKQRTFDNGSIPHQIHLGELHAILRRQEDFYPFLKDNREKIEKILTFRIPYYVGPLARGNSRFAWMTRKSEETITPWNFEEVVDKGASAQSFIERMTNFDKNLPNEKVLPKHSLLYEYFTVYNELTKVKYVTEGMRKPAFLSGEQKKAIVDLLFKTNRKVTVKQLKEDYFKKIECFDSVEISGVEDRFNASLGTYHDLLKIIKDKDFLDNEENEDILEDIVLTLTLFEDREMIEERLKTYAHLFDDKVMKQLKRRRYTGWGRLSRKLINGIRDKQSGKTILDFLKSDGFANRNFMQLIHDDSLTFKEDIQKAQVSGQGDSLHEHIANLAGSPAIKKGILQTVKVVDELVKVMGRHKPENIVIEMARENQTTQKGQKNSRERMKRIEEGIKELGSQILKEHPVENTQLQNEKLYLYYLQNGRDMYVDQELDINRLSDYDVDHIVPQSFLKDDSIDNKVLTRSDKNRGKSDNVPSEEVVKKMKNYWRQLLNAKLITQRKFDNLTKAERGGLSELDKAGFIKRQLVETRQITKHVAQILDSRMNTKYDENDKLIREVKVITLKSKLVSDFRKDFQFYKVREINNYHHAHDAYLNAVVGTALIKKYPKLESEFVYGDYKVYDVRKMIAKSEQEIGKATAKYFFYSNIMNFFKTEITLANGEIRKRPLIETNGETGEIVWDKGRDFATVRKVLSMPQVNIVKKTEVQTGGFSKESIRPKRNSDKLIARKKDWDPKKYGGFVSPTVAYSVLVVAKVEKGKSKKLKSVKELLGITIMERSSFEKNPIDFLEAKGYKEVKKDLIIKLPKYSLFELENGRKRMLASARFLQKGNELALPSKYVNFLYLASHYEKLKGSPEDNEQKQLFVEQHKHYLDEIIEQISEFSKRVILADANLDKVLSAYNKHRDKPIREQAENIIHLFTLTNLGAPRAFKYFDTTIDRKVYRSTKEVLDATLIHQSITGLYETRIDLSQLGGD

SEQ ID NO: 18231 - protein, 1368 aa, Streptococcus pyogenes
MDKKYSIGLDIGTNSVGWAVITDEYKVPSKKFKVLGNTDRHSIKKNLIGALLFDSGETAERTRLKRTARRRYTRRKNRICYLQEIFSNEMAKVDDSFFHRLEESFLVEEDKKHERHPIFGNIVDEVAYHEKYPTIYHLRKKLVDSTDKADLRLIYLALAHMIKFRGHFLIEGDLNPDNSDVDKLFIQLVQTYNQLFEENPINASGVDAKAILSARLSKSRRLENLIAQLPGEKKNGLFGNLIALSLGLTPNFKSNFDLAEDAKLQLSKDTYDDDLDNLLAQIGDQYADLFLAAKNLSDAILLSDILRVNTEITKAPLSASMIKRYDEHHQDLTLLKALVRQQLPEKYKEIFFDQSKNGYAGYIDGGASQEEFYKFIKPILEKMDGTEELLVKLNREDLLRKQRTFDNGSIPHQIHLGELHAILRRQEDFYPFLKDNREKIEKILTFRIPYYVGPLARGNSRFAWMTRKSEETITPWNFEEVVDKGASAQSFIERMTNFDKNLPNEKVLPKHSLLYEYFTVYNELTKVKYVTEGMRKPAFLSGEQKKAIVDLLFKTNRKVTVKQLKEDYFKKIECFDSVEISGVEDRFNASLGTYHDLLKIIKDKDFLDNEENEDILEDIVLTLTLFEDREMIEERLKTYAHLFDDKVMKQLKRRRYTGWGRLSRKLINGIRDKQSGKTILDFLKSDGFANRNFMQLIHDDSLTFKEDIQKAQVSGQGDSLHEHIANLAGSPAIKKGILQTVKVVDELVKVMGRHKPENIVIEMARENQTTQKGQKNSRERMKRIEEGIKELGSQILKEHPVENTQLQNEKLYLYYLQNGRDMYVDQELDINRLSDYDVDHIVPQSFLKDDSIDNKVLTRSDKNRGKSDNVPSEEVVKKMKNYWRQLLNAKLITQRKFDNLTKAERGGLSELDKAGFIKRQLVETRQITKHVAQILDSRMNTKYDENDKLIREVKVITLKSKLVSDFRKDFQFYKVREINNYHHAHDAYLNAVVGTALIKKYPKLESEFVYGDYKVYDVRKMIAKSEQEIGKATAKYFFYSNIMNFFKTEITLANGEIRKRPLIETNGETGEIVWDKGRDFATVRKVLSMPQVNIVKKTEVQTGGFSKESIRPKRNSDKLIARKKDWDPKKYGGFLWPTVAYSVLVVAKVEKGKSKKLKSVKELLGITIMERSSFEKNPIDFLEAKGYKEVKKDLIIKLPKYSLFELENGRKRMLASAKQLQKGNELALPSKYVNFLYLASHYEKLKGSPEDNEQKQLFVEQHKHYLDEIIEQISEFSKRVILADANLDKVLSAYNKHRDKPIREQAENIIHLFTLTRLGAPRAFKYFDTTIDPKQYRSTKEVLDATLIHQSITGLYETRIDLSQLGGD

SEQ ID NO: 18232 - protein, 1121 aa, Streptococcus thermophilus
MSDLVLGLDIGIGSVGVGILNKVTGEIIHKNSRIFPAAQAENNLVRRTNRQGRRLARRKKHRRVRLNRLFEESGLITDFTKISINLNPYQLRVKGLTDELSNEELFIALKNMVKHRGISYLDDASDDGNSSVGDYAQIVKENSKQLETKTPGQIQLERYQTYGQLRGDFTVEKDGKKHRLINVFPTSAYRSEALRILQTQQEFNPQITDEFINRYLEILTGKRKYYHGPGNEKSRTDYGRYRTSGETLDNIFGILIGKCTFYPDEFRAAKASYTAQEFNLLNDLNNLTVPTETKKLSKEQKNQIINYVKNEKAMGPAKLFKYIAKLLSCDVADIKGYRIDKSGKAEIHTFEAYRKMKTLETLDIEQMDRETLDKLAYVLTLNTEREGIQEALEHEFADGSFSQKQVDELVQFRKANSSIFGKGWHNFSVKLMMELIPELYETSEEQMTILTRLGKQKTTSSSNKTKYIDEKLLTEEIYNPVVAKSVRQAIKIVNAAIKEYGDFDNIVIEMARETNEDDEKKAIQKIQKANKDEKDAAMLKAANQYNGKAELPHSVFHGHKQLATKIRLWHQQGERCLYTGKTISIHDLINNSNQFEVDHILPLSITFDDSLANKVLVYATANQEKGQRTPYQALDSMDDAWSFRELKAFVRESKTLSNKKKEYLLTEEDISKFDVRKKFIERNLVDTRYASRVVLNALQEHFRAHKIDTKVSVVRGQFTSQLRRHWGIEKTRDTYHHHAVDALIIAASSQLNLWKKQKNTLVSYSEDQLLDIETGELISDDEYKESVFKAPYQHFVDTLKSKEFEDSILFSYQVDSKFNRKISDATIYATRQAKVGKDKADETYVLGKIKDIYTQDGYDAFMKIYKKDKSKFLMYRHDPQTFEKVIEPILENYPNKQINEKGKEVPCNPFLKYKEEHGYIRKYSKKGNGPEIKSLKYYDSKLGNHIDITPKDSNNKVVLQSVSPWRADVYFNKTTGKYEILGLKYADLQFEKGTGTYKISQEKYNDIKKKEGVDSDSEFKFTLYKNDLLLVKDTETKEQQLFRFLSRTMPKQKHYVELKPYDKQKFEGGEALIKVLGNVANSGQCKKGLGKSNISIYKVRTDVLGNQHIIKNEGDKPKLDF

SEQ ID NO: 18233 - protein, 1092 aa, Brevibacillus laterosporus
MAYTMGIDVGIASCGWAIVDLERQRIIDIGVRTFEKAENPKNGEALAVPRREARSSRRRLRRKKHRIERLKHMFVRNGLAVDIQHLEQTLRSQNEIDVWQLRVDGLDRMLTQKEWLRVLIHLAQRRGFQSNRKTDGSSEDGQVLVNVTENDRLMEEKDYRTVAEMMVKDEKFSDHKRNKNGNYHGVVSRSSLLVEIHTLFETQRQHHNSLASKDFELEYVNIWSAQRPVATKDQIEKMIGTCTFLPKEKRAPKASWHFQYFMLLQTINHIRITNVQGTRSLNKEEIEQVVNMALTKSKVSYHDTRKILDLSEEYQFVGLDYGKEDEKKKVESKETIIKLDDYHKLNKIFNEVELAKGETWEADDYDTVAYALTFFKDDEDIRDYLQNKYKDSKNRLVKNLANKEYTNELIGKVSTLSFRKVGHLSLKALRKIIPFLEQGMTYDKACQAAGFDFQGISKKKRSVVLPVIDQISNPVVNRALTQTRKVINALIKKYGSPETIHIETARELSKTFDERKNITKDYKENRDKNEHAKKHLSELGIINPTGLDIVKYKLWCEQQGRCMYSNQPISFERLKESGYTEVDHIIPYSRSMNDSYNNRVLVMTRENREKGNQTPFEYMGNDTQRWYEFEQRVTTNPQIKKEKRQNLLLKGFTNRRELEMLERNLNDTRYITKYLSHFISTNLEFSPSDKKKKVVNTSGRITSHLRSRWGLEKNRGQNDLHHAMDAIVIAVTSDSFIQQVTNYYKRKERRELNGDDKFPLPWKFFREEVIARLSPNPKEQIEALPNHFYSEDELADLQPIFVSRMPKRSITGEAHQAQFRRVVGKTKEGKNITAKKTALVDISYDKNGDFNMYGRETDPATYEAIKERYLEFGGNVKKAFSTDLHKPKKDGTKGPLIKSVRIMENKTLVHPVNKGKGVVYNSSIVRTDVFQRKEKYYLLPVYVTDVTKGKLPNKVIVAKKGYHDWIEVDDSFTFLFSLYPNDLIFIRQNPKKKISLKKRIESHSISDSKEVQEIHAYYKGVDSSTAAIEFIIHDGSYYAKGVGVQNLDCFEKYQVDILGNYFKVKGEKRLELETSDSNHKGKDVNSIKSTSR

SEQ ID NO: 18234 - protein, 1053 aa, Staphylococcus aureus
MKRNYILGLDIGITSVGYGIIDYETRDVIDAGVRLFKEANVENNEGRRSKRGARRLKRRRRHRIQRVKKLLFDYNLLTDHSELSGINPYEARVKGLSQKLSEEEFSAALLHLAKRRGVHNVNEVEEDTGNELSTKEQISRNSKALEEKYVAELQLERLKKDGEVRGSINRFKTSDYVKEAKQLLKVQKAYHQLDQSFIDTYIDLLETRRTYYEGPGEGSPFGWKDIKEWYEMLMGHCTYFPEELRSVKYAYNADLYNALNDLNNLVITRDENEKLEYYEKFQIIENVFKQKKKPTLKQIAKEILVNEEDIKGYRVTSTGKPEFTNLKVYHDIKDITARKEIIENAELLDQIAKILTIYQSSEDIQEELTNLNSELTQEEIEQISNLKGYTGTHNLSLKAINLILDELWHTNDNQIAIFNRLKLVPKKVDLSQQKEIPTTLVDDFILSPVVKRSFIQSIKVINAIIKKYGLPNDIIIELAREKNSKDAQKMINEMQKRNRQTNERIEEIIRTTGKENAKYLIEKIKLHDMQEGKCLYSLEAIPLEDLLNNPFNYEVDHIIPRSVSFDNSFNNKVLVKQEENSKKGNRTPFQYLSSSDSKISYETFKKHILNLAKGKGRISKTKKEYLLEERDINRFSVQKDFINRNLVDTRYATRGLMNLLRSYFRVNNLDVKVKSINGGFTSFLRRKWKFKKERNKGYKHHAEDALIIANADFIFKEWKKLDKAKKVMENQMFEEKQAESMPEIETEQEYKEIFITPHQIKHIKDFKDYKYSHRVDKKPNRKLINDTLYSTRKDDKGNTLIVNNLNGLYDKDNDKLKKLINKSPEKLLMYHHDPQTYQKLKLIMEQYGDEKNPLYKYYEETGNYLTKYSKKDNGPVIKKIKYYGNKLNAHLDITDDYPNSRNKVVKLSLKPYRFDVYLDNGVYKFVTVKNLDVIKKENYYEVNSKCYEEAKKLKKISNQAEFIASFYKNDLIKINGELYRVIGVNSDKNNLIEVNMIDITYREYLENMNDKRPPHIIKTIASKTQSIKKYSTDILGNLYEVKSKKHPQIIKKG

SEQ ID NO: 18235 - protein, 1053 aa, Staphylococcus aureus
MKRNYILGLDIGITSVGYGIIDYETRDVIDAGVRLFKEANVENNEGRRSKRGARRLKRRRRHRIQRVKKLLFDYNLLTDHSELSGINPYEARVKGLSQKLSEEEFSAALLHLAKRRGVHNVNEVEEDTGNELSTKEQISRNSKALEEKYVAELQLERLKKDGEVRGSINRFKTSDYVKEAKQLLKVQKAYHQLDQSFIDTYIDLLETRRTYYEGPGEGSPFGWKDIKEWYEMLMGHCTYFPEELRSVKYAYNADLYNALNDLNNLVITRDENEKLEYYEKFQIIENVFKQKKKPTLKQIAKEILVNEEDIKGYRVTSTGKPEFTNLKVYHDIKDITARKEIIENAELLDQIAKILTIYQSSEDIQEELTNLNSELTQEEIEQISNLKGYTGTHNLSLKAINLILDELWHTNDNQIAIFNRLKLVPKKVDLSQQKEIPTTLVDDFILSPVVKRSFIQSIKVINAIIKKYGLPNDIIIELAREKNSKDAQKMINEMQKRNRQTNERIEEIIRTTGKENAKYLIEKIKLHDMQEGKCLYSLEAIPLEDLLNNPFNYEVDHIIPRSVSFDNSFNNKVLVKQEENSKKGNRTPFQYLSSSDSKISYETFKKHILNLAKGKGRISKTKKEYLLEERDINRFSVQKDFINRNLVDTRYATRGLMNLLRSYFRVNNLDVKVKSINGGFTSFLRRKWKFKKERNKGYKHHAEDALIIANADFIFKEWKKLDKAKKVMENQMFEEKQAESMPEIETEQEYKEIFITPHQIKHIKDFKDYKYSHRVDKKPNRKLINDTLYSTRKDDKGNTLIVNNLNGLYDKDNDKLKKLINKSPEKLLMYHHDPQTYQKLKLIMEQYGDEKNPLYKYYEETGNYLTKYSKKDNGPVIKKIKYYGNKLNAHLDITDDYPNSRNKVVKLSLKPYRFDVYLDNGVYKFVTVKNLDVIKKENYYEVNSKCYEEAKKLKKISNQAEFIASFYKNDLIKINGELYRVIGVNNSTRNIVELNMIDITYREYLENMNDKRPPHIIKTIASKTQSIKKYSTDILGNLYEVKSKKHPQIIKKG

SEQ ID NO: 18236 - protein, 1053 aa, Staphylococcus aureus
MKRNYILGLDIGITSVGYGIIDYETRDVIDAGVRLFKEANVENNEGRRSKRGARRLKRRRRHRIQRVKKLLFDYNLLTDHSELSGINPYEARVKGLSQKLSEEEFSAALLHLAKRRGVHNVNEVEEDTGNELSTKEQISRNSKALEEKYVAELQLERLKKDGEVRGSINRFKTSDYVKEAKQLLKVQKAYHQLDQSFIDTYIDLLETRRTYYEGPGEGSPFGWKDIKEWYEMLMGHCTYFPEELRSVKYAYNADLYNALNDLNNLVITRDENEKLEYYEKFQIIENVFKQKKKPTLKQIAKEILVNEEDIKGYRVTSTGKPEFTNLKVYHDIKDITARKEIIENAELLDQIAKILTIYQSSEDIQEELTNLNSELTQEEIEQISNLKGYTGTHNLSLKAINLILDELWHTNDNQIAIFNRLKLVPKKVDLSQQKEIPTTLVDDFILSPVVKRSFIQSIKVINAIIKKYGLPNDIIIELAREKNSKDAQKMINEMQKRNRQTNERIEEIIRTTGKENAKYLIEKIKLHDMQEGKCLYSLEAIPLEDLLNNPFNYEVDHIIPRSVSFDNSFNNKVLVKQEENSKKGNRTPFQYLSSSDSKISYETFKKHILNLAKGKGRISKTKKEYLLEERDINRFSVQKDFINRNLVDTRYATRGLMNLLRSYFRVNNLDVKVKSINGGFTSFLRRKWKFKKERNKGYKHHAEDALIIANADFIFKEWKKLDKAKKVMENQMFEEKQAESMPEIETEQEYKEIFITPHQIKHIKDFKDYKYSHRVDKKPNRKLINDTLYSTRKDDKGNTLIVNNLNGLYDKDNDKLKKLINKSPEKLLMYHHDPQTYQKLKLIMEQYGDEKNPLYKYYEETGNYLTKYSKKDNGPVIKKIKYYGNKLNAHLDITDDYPNSRNKVVKLSLKPYRFDVYLDNGVYKFVTVKNLDVIKKENYYEVNSKCYEEAKKLKKISNQAEFIASFYKNDLIKINGELYRVIGVNSDDRNIIELNMIDITYREYLENMNDKRPPHIIKTIASKTQSIKKYSTDILGNLYEVKSKKHPQIIKKG

SEQ ID NO: 18237 - protein, 1053 aa, Staphylococcus aureus
MKRNYILGLDIGITSVGYGIIDYETRDVIDAGVRLFKEANVENNEGRRSKRGARRLKRRRRHRIQRVKKLLFDYNLLTDHSELSGINPYEARVKGLSQKLSEEEFSAALLHLAKRRGVHNVNEVEEDTGNELSTKEQISRNSKALEEKYVAELQLERLKKDGEVRGSINRFKTSDYVKEAKQLLKVQKAYHQLDQSFIDTYIDLLETRRTYYEGPGEGSPFGWKDIKEWYEMLMGHCTYFPEELRSVKYAYNADLYNALNDLNNLVITRDENEKLEYYEKFQIIENVFKQKKKPTLKQIAKEILVNEEDIKGYRVTSTGKPEFTNLKVYHDIKDITARKEIIENAELLDQIAKILTIYQSSEDIQEELTNLNSELTQEEIEQISNLKGYTGTHNLSLKAINLILDELWHTNDNQIAIFNRLKLVPKKVDLSQQKEIPTTLVDDFILSPVVKRSFIQSIKVINAIIKKYGLPNDIIIELAREKNSKDAQKMINEMQKRNRQTNERIEEIIRTTGKENAKYLIEKIKLHDMQEGKCLYSLEAIPLEDLLNNPFNYEVDHIIPRSVSFDNSFNNKVLVKQEENSKKGNRTPFQYLSSSDSKISYETFKKHILNLAKGKGRISKTKKEYLLEERDINRFSVQKDFINRNLVDTRYATRGLMNLLRSYFRVNNLDVKVKSINGGFTSFLRRKWKFKKERNKGYKHHAEDALIIANADFIFKEWKKLDKAKKVMENQMFEEKQAESMPEIETEQEYKEIFITPHQIKHIKDFKDYKYSHRVDKKPNRKLINDTLYSTRKDDKGNTLIVNNLNGLYDKDNDKLKKLINKSPEKLLMYHHDPQTYQKLKLIMEQYGDEKNPLYKYYEETGNYLTKYSKKDNGPVIKKIKYYGNKLNAHLDITDDYPNSRNKVVKLSLKPYRFDVYLDNGVYKFVTVKNLDVIKKENYYEVNSKCYEEAKKLKKISNQAEFIASFYKNDLIKINGELYRVIGVNNNRLNKIELNMIDITYREYLENMNDKRPPHIIKTIASKTQSIKKYSTDILGNLYEVKSKKHPQIIKKG

SEQ ID NO: 18238 - protein, 1084 aa, Corynebacterium diphtheriae
MKYHVGIDVGTFSVGLAAIEVDDAGMPIKTLSLVSHIHDSGLDPDEIKSAVTRLASSGIARRTRRLYRRKRRRLQQLDKFIQRQGWPVIELEDYSDPLYPWKVRAELAASYIADEKERGEKLSVALRHIARHRGWRNPYAKVSSLYLPDGPSDAFKAIREEIKRASGQPVPETATVGQMVTLCELGTLKLRGEGGVLSARLQQSDYAREIQEICRMQEIGQELYRKIIDVVFAAESPKGSASSRVGKDPLQPGKNRALKASDAFQRYRIAALIGNLRVRVDGEKRILSVEEKNLVFDHLVNLTPKKEPEWVTIAEILGIDRGQLIGTATMTDDGERAGARPPTHDTNRSIVNSRIAPLVDWWKTASALEQHAMVKALSNAEVDDFDSPEGAKVQAFFADLDDDVHAKLDSLHLPVGRAAYSEDTLVRLTRRMLSDGVDLYTARLQEFGIEPSWTPPTPRIGEPVGNPAVDRVLKTVSRWLESATKTWGAPERVIIEHVREGFVTEKRAREMDGDMRRRAARNAKLFQEMQEKLNVQGKPSRADLWRYQSVQRQNCQCAYCGSPITFSNSEMDHIVPRAGQGSTNTRENLVAVCHRCNQSKGNTPFAIWAKNTSIEGVSVKEAVERTRHWVTDTGMRSTDFKKFTKAVVERFQRATMDEEIDARSMESVAWMANELRSRVAQHFASHGTTVRVYRGSLTAEARRASGISGKLKFFDGVGKSRLDRRHHAIDAAVIAFTSDYVAETLAVRSNLKQSQAHRQEAPQWREFTGKDAEHRAAWRVWCQKMEKLSALLTEDLRDDRVVVMSNVRLRLGNGSAHKETIGKLSKVKLSSQLSVSDIDKASSEALWCALTREPGFDPKEGLPANPERHIRVNGTHVYAGDNIGLFPVSAGSIALRGGYAELGSSFHHARVYKITSGKKPAFAMLRVYTIDLLPYRNQDLFSVELKPQTMSMRQAEKKLRDALATGNAEYLGWLVVDDELVVDTSKIATDQVKAVEAELGTIRRWRVDGFFSPSKLRLRPLQMSKEGIKKESAPELSKIIDRPGWLPAVNKLFSDGNVTVVRRDSLGRVRLESTAHLPVTWKVQ

SEQ ID NO: 18239 - protein, 984 aa, Campylobacter jejuni
MARILAFDIGISSIGWAFSENDELKDCGVRIFTKVENPKTGESLALPRRLARSARKRLARRKARLNHLKHLIANEFKLNYEDYQSFDESLAKAYKGSLISPYELRFRALNELLSKQDFARVILHIAKRRGYDDIKNSDDKEKGAILKAIKQNEEKLANYQSVGEYLYKEYFQKFKENSKEFTNVRNKKESYERCIAQSFLKDELKLIFKKQREFGFSFSKKFEEEVLSVAFYKRALKDFSHLVGNCSFFTDEKRAPKNSPLAFMFVALTRIINLLNNLKNTEGILYTKDDLNALLNEVLKNGTLTYKQTKKLLGLSDDYEFKGEKGTYFIEFKKYKEFIKALGEHNLSQDDLNEIAKDITLIKDEIKLKKALAKYDLNQNQIDSLSKLEFKDHLNISFKALKLVTPLMLEGKKYDEACNELNLKVAINEDKKDFLPAFNETYYKDEVTNPVVLRAIKEYRKVLNALLKKYGKVHKINIELAREVGKNHSQRAKIEKEQNENYKAKKDAELECEKLGLKINSKNILKLRLFKEQKEFCAYSGEKIKISDLQDEKMLEIDHIYPYSRSFDDSYMNKVLVFTKQNQEKLNQTPFEAFGNDSAKWQKIEVLAKNLPTKKQKRILDKNYKDKEQKNFKDRNLNDTRYIARLVLNYTKDYLDFLPLSDDENTKLNDTQKGSKVHVEAKSGMLTSALRHTWGFSAKDRNNHLHHAIDAVIIAYANNSIVKAFSDFKKEQESNSAELYAKKISELDYKNKRKFFEPFSGFRQKVLDKIDEIFVSKPERKKPSGALHEETFRKEEEFYQSYGGKEGVLKALELGKIRKVNGKIVKNGDMFRVDIFKHKKTNKFYAVPIYTMDFALKVLPNKAVARSKKGEIKDWILMDENYEFCFSLYKDSLILIQTKDMQEPEFVYYNAFTSSTVSLIVSKHDNKFETLSKNQKILFKNANEKEVIAKSIGIQNLKVFEKYIVSALGEVTKAEFRQREDFKK

SEQ ID NO: 18240 - protein, 1087 aa, Geobacillus stearothermophilus
MRYKIGLDIGITSVGWAVMNLDIPRIEDLGVRIFDRAENPQTGESLALPRRLARSARRRLRRRKHRLERIRRLVIREGILTKEELDKLFEEKHEIDVWQLRVEALDRKLNNDELARVLLHLAKRRGFKSNRKSERSNKENSTMLKHIEENRAILSSYRTVGEMIVKDPKFALHKRNKGENYTNTIARDDLEREIRLIFSKQREFGNMSCTEEFENEYITIWASQRPVASKDDIEKKVGFCTFEPKEKRAPKATYTFQSFIAWEHINKLRLISPSGARGLTDEERRLLYEQAFQKNKITYHDIRTLLHLPDDTYFKGIVYDRGESRKQNENIRFLELDAYHQIRKAVDKVYGKGKSSSFLPIDFDTFGYALTLFKDDADIHSYLRNEYEQNGKRMPNLANKVYDNELIEELLNLSFTKFGHLSLKALRSILPYMEQGEVYSSACERAGYTFTGPKKKQKTMLLPNIPPIANPVVMRALTQARKVVNAIIKKYGSPVSIHIELARDLSQTFDERRKTKKEQDENRKKNETAIRQLMEYGLTLNPTGHDIVKFKLWSEQNGRCAYSLQPIEIERLLEPGYVEVDHVIPYSRSLDDSYTNKVLVLTRENREKGNRIPAEYLGVGTERWQQFETFVLTNKQFSKKKRDRLLRLHYDENEETEFKNRNLNDTRYISRFFANFIREHLKFAESDDKQKVYTVNGRVTAHLRSRWEFNKNREESDLHHAVDAVIVACTTPSDIAKVTAFYQRREQNKELAKKTEPHFPQPWPHFADELRARLSKHPKESIKALNLGNYDDQKLESLQPVFVSRMPKRSVTGAAHQETLRRYVGIDERSGKIQTVVKTKLSEIKLDASGHFPMYGKESDPRTYEAIRQRLLEHNNDPKKAFQEPLYKPKKNGEPGPVIRTVKIIDTKNQVIPLNDGKTVAYNSNIVRVDVFEKDGKYYCVPVYTMDIMKGILPNKAIEPNKPYSEWKEMTEDYTFRFSLYPNDLIRIELPREKTVKTAAGEEINVKDVFVYYKTIDSANGGLELISHDHRFSLRGVGSRTLKRFEKYQVDVLGNIYKVRGEKRVGLASSAHSKPGKTIRPLQSTRD

SEQ ID NO: 18241 - protein, 1378 aa, Streptococcus sp.
MDKKYSIGLDIGTNSVGWAVITDEYKVPSKKFKVLGNTDRHSIKKNLIGALLFDSGETAEATRLKRTARRRYTRRKNRICYLQEIFSNEMAKVDDSFFHRLEESFLVEEDKKHERHPIFGNIVDEVAYHEKYPTIYHLRKKLVDSTDKADLRLIYLALAHMIKFRGHFLIEGDLNPDNSDVDKLFIQLVQTYNQLFEENPINASGVDAKAILSARLSKSRKLENLIAQLPGEKKNGLFGNLIALSLGLTPNFKSNFDLAEDAKLQLSKDTYDDDLDNLLAQIGDQYADLFLAAKNLSDAILLSDILRVNTEITKAPLSASMIKRYDEHHQDLTLLKALVRQQLPEKYKEIFFDQSKNGYAGYIDGGASQEEFYKFIKPILEKMDGTEELLVKLKREDLLRKQRTFDNGSIPHQIHLGELHAILRRQEDFYPFLKDNREKIEKILTFRIPYYVGPLARGNSRFAWMTRKSEETITPWNFEEVVDKGASAQSFIERMTNFDKNLPNEKVLPKHSLLYEYFTVYNELTKVKYVTEGMRKPAFLSGEQKKAIVDLLFKTNRKVTVKQLKEDYFKKIECFDSVEISGVEDRFNASLGTYHDLLKIIKDKDFLDNEENEDILEDIVLTLTLFEDREMIEERLKTYAHLFDDKVMKQLKRRRYTGWGRLSRKLINGIRDKQSGKTILDFLKSDGFANRNFMQLIHDDSLTFKEDIQKAQVSGQGDSLHEHIANLAGSPAIKKGILQTVKVVDELVKVMGRHKPENIVIEMARENQTTQKGQKNSRERMKRIEEGIKELGSQILKEHPVENTQLQNEKLYLYYLQNGRDMYVDQELDINRLSDYDVDHIVPQSFLKDDSIDNKVLTRSDKNRGKSDNVPSEEVVKKMKNYWRQLLNAKLITQRKFDNLTKAERGGLSELDKAGFIKRQLVETRQITKHVAQILDSRMNTKYDENDKLIREVKVITLKSKLVSDFRKDFQFYKVREINNYHHAHDAYLNAVVGTALIKKYPKLESEFVYGDYKVYDVRKMIAKSEQEIGKATAKYFFYSNIMNFFKTEITLANGEIRKRPLIETNGETGEIVWDKGRDFATVRKVLSMPQVNIVKKTEIQTVGQNGGLFDDNPKSPLEVTPSKLVPLKKELNPKKYGGYQKPTTAYPVLLITDTKQLIPISVMNKKQFEQNPVKFLRDRGYQQVGKNDFIKLPKYTLVDIGDGIKRLWASSKEIHKGNQLVVSKKSQILLYHAHHLDSDLSNDYLQNHNQQFDVLFNEIISFSKKCKLGKEHIQKIENVYSNKKNSASIEELAESFIKLLGFTQLGATSPFNFLGVKLNQKQYKGKKDYILPCTEGTLIRQSITGLYETRVDLSKIGEDSGGSGGSKRTADGSEFES

SEQ ID NO: 18242 - protein, 1082 aa, Neisseria meningitidis
MAAFKPNSINYILGLDIGIASVGWAMVEIDEEENPIRLIDLGVRVFERAEVPKTGDSLAMARRLARSVRRLTRRRAHRLLRTRRLLKREGVLQAANFDENGLIKSLPNTPWQLRAAALDRKLTPLEWSAVLLHLIKHRGYLSQRKNEGETADKELGALLKGVAGNAHALQTGDFRTPAELALNKFEKESGHIRNQRSDYSHTFSRKDLQAELILLFEKQKEFGNPHVSGGLKEGIETLLMTQRPALSGDAVQKMLGHCTFEPAEPKAAKNTYTAERFIWLTKLNNLRILEQGSERPLTDTERATLMDEPYRKSKLTYAQARKLLGLEDTAFFKGLRYGKDNAEASTLMEMKAYHAISRALEKEGLKDKKSPLNLSPELQDEIGTAFSLFKTDEDITGRLKDRIQPEILEALLKHISFDKFVQISLKALRRIVPLMEQGKRYDEACAEIYGDHYGKKNTEEKIYLPPIPADEIRNPVVLRALSQARKVINGVVRRYGSPARIHIETAREVGKSFKDRKEIEKRQEENRKDREKAAAKFREYFPNFVGEPKSKDILKLRLYEQQHGKCLYSGKEINLGRLNEKGYVEIDHALPFSRTWDDSFNNKVLVLGSENQNKGNQTPYEYFNGKDNSREWQEFKARVETSRFPRSKKQRILLQKFDEDGFKERNLNDTRYVNRFLCQFVADRMRLTGKGKKRVFASNGQITNLLRGFWGLRKVRAENDRHHALDAVVVACSTVAMQQKITRFVRYKEMNAFDGKTIDKETGEVLHQKTHFPQPWEFFAQEVMIRVFGKPDGKPEFEEADTLEKLRTLLAEKLSSRPEAVHEYVTPLFVSRAPNRKMSGQGHMETVKSAKRLDEGVSVLRVPLTQLKLKDLEKMVNREREPKLYEALKARLEAHKDDPAKAFAEPFYKYDKAGNRTQQVKAVRVEQVQKTGVWVRNHNGIADNATMVRVDVFEKGDKYYLVPIYSWQVAKGILPDRAVVQGKDEEDWQLIDDSFNFKFSLHPNDLVEVITKKARMFGYFASCHRGTGNINIRIHDLDHKIGKNGILEGIGVKTALSFQKYQIDELGKEIRPCRLKKRPPVR

SEQ ID NO: 18243 - protein, 1375 aa, Streptococcus canis
MEKKYSIGLDIGTNSVGWAVITDDYKVPSKKFKVLGNTNRKSIKKNLMGALLFDSGETAEATRLKRTARRRYTRRKNRIRYLQEIFANEMAKLDDSFFQRLEESFLVEEDKKNERHPIFGNLADEVAYHRNYPTIYHLRKKLADSPEKADLRLIYLALAHIIKFRGHFLIEGKLNAENSDVAKLFYQLIQTYNQLFEESPLDEIEVDAKGILSARLSKSKRLEKLIAVFPNEKKNGLFGNIIALALGLTPNFKSNFDLTEDAKLQLSKDTYDDDLDELLGQIGDQYADLFSAAKNLSDAILLSDILRSNSEVTKAPLSASMVKRYDEHHQDLALLKTLVRQQFPEKYAEIFKDDTKNGYAGYVGIGIKHRKRTTKLATQEEFYKFIKPILEKMDGAEELLAKLNRDDLLRKQRTFDNGSIPHQIHLKELHAILRRQEEFYPFLKENREKIEKILTFRIPYYVGPLARGNSRFAWLTRKSEEAITPWNFEEVVDKGASAQSFIERMTNFDEQLPNKKVLPKHSLLYEYFTVYNELTKVKYVTERMRKPEFLSGEQKKAIVDLLFKTNRKVTVKQLKEDYFKKIECFDSVEIIGVEDRFNASLGTYHDLLKIIKDKDFLDNEENEDILEDIVLTLTLFEDREMIEERLKTYAHLFDDKVMKQLKRRHYTGWGRLSRKMINGIRDKQSGKTILDFLKSDGFSNRNFMQLIHDDSLTFKEEIEKAQVSGQGDSLHEQIADLAGSPAIKKGILQTVKIVDELVKVMGHKPENIVIEMARENQTTTKGLQQSRERKKRIEEGIKELESQILKENPVENTQLQNEKLYLYYLQNGRDMYVDQELDINRLSDYDVDHIVPQSFIKDDSIDNKVLTRSVENRGKSDNVPSEEVVKKMKNYWRQLLNAKLITQRKFDNLTKAERGGLSEADKAGFIKRQLVETRQITKHVARILDSRMNTKRDKNDKPIREVKVITLKSKLVSDFRKDFQLYKVRDINNYHHAHDAYLNAVVGTALIKKYPKLESEFVYGDYKVYDVRKMIAKSEQEIGKATAKRFFYSNIMNFFKTEVKLANGEIRKRPLIETNGETGEVVWNKEKDFATVRKVLAMPQVNIVKKTEVQTGGFSKESILSKRESAKLIPRKKGWDTRKYGGFGSPTVAYSILVVAKVEKGKAKKLKSVKVLVGITIMEKGSYEKDPIGFLEAKGYKDIKKELIFKLPKYSLFELENGRRRMLASATELQKANELVLPQHLVRLLYYTQNISATTGSNNLGYIEQHREEFKEIFEKIIDFSEKYILKNKVNSNLKSSFDEQFAVSDSILLSNSFVSLLKYTSFGASGGFTFLDLDVKQGRLRYQTVTEVLDATLIYQSITGLYETRTDLSQLGGD

SEQ ID NO: 18244 - protein, 1375 aa, Streptococcus canis
MEKKYSIGLDIGTNSVGWAVITDDYKVPSKKFKVLGNTNRKSIKKNLMGALLFDSGETAEATRLKRTARRRYTRRKNRIRYLQEIFANEMAKLDDSFFQRLEESFLVEEDKKNERHPIFGNLADEVAYHRNYPTIYHLRKKLADSPEKADLRLIYLALAHIIKFRGHFLIEGKLNAENSDVAKLFYQLIQTYNQLFEESPLDEIEVDAKGILSARLSKSKRLEKLIAVFPNEKKNGLFGNIIALALGLTPNFKSNFDLTEDAKLQLSKDTYDDDLDELLGQIGDQYADLFSAAKNLSDAILLSDILRSNSEVTKAPLSASMVKRYDEHHQDLALLKTLVRQQFPEKYAEIFKDDTKNGYAGYVGADKKLRKRSGKLATEEEFYKFIKPILEKMDGAEELLAKLNRDDLLRKQRTFDNGSIPHQIHLKELHAILRRQEEFYPFLKENREKIEKILTFRIPYYVGPLARGNSRFAWLTRKSEEAITPWNFEEVVDKGASAQSFIERMTNFDEQLPNKKVLPKHSLLYEYFTVYNELTKVKYVTERMRKPEFLSGEQKKAIVDLLFKTNRKVTVKQLKEDYFKKIECFDSVEIIGVEDRFNASLGTYHDLLKIIKDKDFLDNEENEDILEDIVLTLTLFEDREMIEERLKTYAHLFDDKVMKQLKRRHYTGWGRLSRKMINGIRDKQSGKTILDFLKSDGFSNANFMQLIHDDSLTFKEEIEKAQVSGQGDSLHEQIADLAGSPAIKKGILQTVKIVDELVKVMGHKPENIVIEMARENQTTTKGLQQSRERKKRIEEGIKELESQILKENPVENTQLQNEKLYLYYLQNGRDMYVDQELDINRLSDYDVDHIVPQSFIKDDSIDNKVLTRSVENRGKSDNVPSEEVVKKMKNYWRQLLNAKLITQRKFDNLTKAERGGLSEADKAGFIKRQLVETRQITKHVARILDSRMNTKRDKNDKPIREVKVITLKSKLVSDFRKDFQLYKVRDINNYHHAHDAYLNAVVGTALIKKYPKLESEFVYGDYKVYDVRKMIAKSEQEIGKATAKRFFYSNIMNFFKTEVKLANGEIRKRPLIETNGETGEVVWNKEKDFATVRKVLAMPQVNIVKKTEVQTGGFSKESILSKRESAKLIPRKKGWDTRKYGGFGSPTVAYSILVVAKVEKGKAKKLKSVKVLVGITIMEKGSYEKDPIGFLEAKGYKDIKKELIFKLPKYSLFELENGRRRMLASAKELQKANELVLPQHLVRLLYYTQNISATTGSNNLGYIEQHREEFKEIFEKIIDFSEKYILKNKVNSNLKSSFDEQFAVSDSILLSNSFVSLLKYTSFGASGGFTFLDLDVKQGRLRYQTVTEVLDATLIYQSITGLYETRTDLSQLGGD

SEQ ID NO: 18245 - protein, 1368 aa, Streptococcus pyogenes
MDKKYSIGLDIGTNSVGWAVITDEYKVPSKKFKVLGNTDRHSIKKNLIGALLFDSGETAEATRLKRTARRRYTRRKNRICYLQEIFSNEMAKVDDSFFHRLEESFLVEEDKKHERHPIFGNIVDEVAYHEKYPTIYHLRKKLVDSTDKADLRLIYLALAHMIKFRGHFLIEGDLNPDNSDVDKLFIQLVQTYNQLFEENPINASGVDAKAILSARLSKSRRLENLIAQLPGEKKNGLFGNLIALSLGLTPNFKSNFDLAEDAKLQLSKDTYDDDLDNLLAQIGDQYADLFLAAKNLSDAILLSDILRVNTEITKAPLSASMVKRYDEHHQDLTLLKALVRQQLPEKYKEIFFDQSKNGYAGYIDGGASQEEFYKFIKPILEKMDGTEELLVKLNREDLLRKQRTFDNGIIPHQIHLGELHAILRRQGDFYPFLKDNREKIEKILTFRIPYYVGPLARGNSRFAWMTRKSEETITPWNFEEVVDKGASAQSFIERMTNFDKNLPNEKVLPKHSLLYEYFTVYNELTKVKYVTEGMRKPAFLSGEQKKAIVDLLFKTNRKVTVKQLKEDYFKKIECFDSVEISGVEDRFNASLGTYHDLLKIIKDKDFLDNEENEDILEDIVLTLTLFEDREMIEERLKTYAHLFDDKVMKQLKRLRYTGWGRLSRKLINGIRDKQSGKTILDFLKSDGFANRNFMQLIHDDSLTFKEDIQKAQVSGQGDSLHEHIANLAGSPAIKKGILQTVKVVDELVKVMGGHKPENIVIEMARENQTTQKGQKNSRERMKRIEEGIKELGSQILKEHPVENTQLQNEKLYLYYLQNGRDMYVDQELDINRLSDYDVDHIVPQSFLKDDSIDNKVLTRSDKNRGKSDNVPSEEVVKKMKNYWRQLLNAKLITQRKFDNLTKAERGGLSELDKAGFIKRQLVETRQITKHVAQILDSRMNTKYDENDKLIREVKVITLKSKLVSDFRKDFQFYKVREINNYHHAHDAYLNAVVGTALIKKYPKLESEFVYGDYKVYDVRKMIAKSEQEIGKATAKYFFYSNIMNFFKTEITLANGEIRKRPLIETNGETGEIVWDKGRDFATVRKVLSMPQVNIVKKTEVQTGGFSKESILPKGNSDKLIARKKDWDPKKYGGFNSPTAAYSVLVVAKVEKGKSKKLKSVKELLGITIMERSSFEKNPIGFLEAKGYKEVKKDLIIKLPKYSLFELENGRKRMLASAGVLHKGNELALPSKYVNFLYLASHYEKLKGSPEDNEQKQLFVEQHKHYLDEIIEQISEFSKRVILADANLDKVLSAYNKHRDKPIREQAENIIHLFTLTNLGVPAAFKYFDTTIDKKRYTSTKEVLDATLIHQSITGLYETRIDLSQLGGD

SEQ ID NO: 18246 - protein, 1368 aa, Streptococcus pyogenes
MDKKYSIGLDIGTNSVGWAVITDEYKVPSKKFKVLGNTDRHSIKKNLIGALLFDSGETAEATRLKRTARRRYTRRKNRICYLQEIFSNEMAKVDDSFFHRLEESFLVEEDKKHERHPIFGNIVDEVAYHEKYPTIYHLRKKLVDSTDKADLRLIYLALAHMIKFRGHFLIEGDLNPDNSDVDKLFIQLVQTYNQLFEENPINASGVDAKAILSARLSKSRRLENLIAQLPGEKKNGLFGNLIALSLGLTPNFKSNFDLAEDAKLQLSKDTYDDDLDNLLAQIGDQYADLFLAAKNLSDAILLSDILRVNTEITKAPLSASMVKRYDEHHQDLTLLKALVRQQLPEKYKEIFFDQSKNGYAGYIDGGASQEEFYKFIKPILEKMDGTEELLVKLNREDLLRKQRTFDNGIIPHQIHLGELHAILRRQGDFYPFLKDNREKIEKILTFRIPYYVGPLARGNSRFAWMTRKSEETITPWNFEEVVDKGASAQSFIERMTNFDKNLPNEKVLPKHSLLYEYFTVYNELTKVKYVTEGMRKPAFLSGEQKKAIVDLLFKTNRKVTVKQLKEDYFKKIECFDSVEISGVEDRFNASLGTYHDLLKIIKDKDFLDNEENEDILEDIVLTLTLFEDREMIEERLKTYAHLFDDKVMKQLKRLRYTGWGRLSRKLINGIRDKQSGKTILDFLKSDGFANRNFMQLIHDDSLTFKEDIQKAQVSGQGDSLHEHIANLAGSPAIKKGILQTVKVVDELVKVMGGHKPENIVIEMARENQTTQKGQKNSRERMKRIEEGIKELGSQILKEHPVENTQLQNEKLYLYYLQNGRDMYVDQELDINRLSDYDVDHIVPQSFLKDDSIDNKVLTRSDKNRGKSDNVPSEEVVKKMKNYWRQLLNAKLITQRKFDNLTKAERGGLSELDKAGFIKRQLVETRQITKHVAQILDSRMNTKYDENDKLIREVKVITLKSKLVSDFRKDFQFYKVREINNYHHAHDAYLNAVVGTALIKKYPKLESEFVYGDYKVYDVRKMIAKSEQEIGKATAKYFFYSNIMNFFKTEITLANGEIRKRPLIETNGETGEIVWDKGRDFATVRKVLSMPQVNIVKKTEVQTGGFSKESILPKGNSDKLIARKKDWDPKKYGGFNSPTVAYSVLVVAKVEKGKSKKLKSVKELLGITIMERSSFEKNPIGFLEAKGYKEVKKDLIIKLPKYSLFELENGRKRMLASASVLHKGNELALPSKYVNFLYLASHYEKLKGSSEDNKQKQLFVEQHKHYLDEIIEQISEFSKRVILADANLDKVLSAYNKHRDKPIREQAENIIHLFTLTNLGASAAFKYFDTTIGRKLYTSTKEVLDATLIHQSITGLYETRIDLSQLGGD

SEQ ID NO: 18247 - protein, 1368 aa, Streptococcus pyogenes
MDKKYSIGLDIGTNSVGWAVITDEYKVPSKKFKVLGNTDRHSIKKNLIGALLFDSGETAEATRLKRTARRRYTRRKNRICYLQEIFSNEMAKVDDSFFHRLEESFLVEEDKKHERHPIFGNIVDEVAYHEKYPTIYHLRKKLVDSTDKADLRLIYLALAHMIKFRGHFLIEGDLNPDNSDVDKLFIQLVQTYNQLFEENPINASGVDAKAILSARLSKSRRLENLIAQLPGEKKNGLFGNLIALSLGLTPNFKSNFDLAEDAKLQLSKDTYDDDLDNLLAQIGDQYADLFLAAKNLSDAILLSDILRVNTEITKAPLSASMVKRYDEHHQDLTLLKALVRQQLPEKYKEIFFDQSKNGYAGYIDGGASQEEFYKFIKPILEKMDGTEELLVKLNREDLLRKQRTFDNGIIPHQIHLGELHAILRRQGDFYPFLKDNREKIEKILTFRIPYYVGPLARGNSRFAWMTRKSEETITPWNFEEVVDKGASAQSFIERMTNFDKNLPNEKVLPKHSLLYEYFTVYNELTKVKYVTEGMRKPAFLSGEQKKAIVDLLFKTNRKVTVKQLKEDYFKKIECFDSVEISGVEDRFNASLGTYHDLLKIIKDKDFLDNEENEDILEDIVLTLTLFEDREMIEERLKTYAHLFDDKVMKQLKRLRYTGWGRLSRKLINGIRDKQSGKTILDFLKSDGFANRNFMQLIHDDSLTFKEDIQKAQVSGQGDSLHEHIANLAGSPAIKKGILQTVKVVDELVKVMGGHKPENIVIEMARENQTTQKGQKNSRERMKRIEEGIKELGSQILKEHPVENTQLQNEKLYLYYLQNGRDMYVDQELDINRLSDYDVDHIVPQSFLKDDSIDNKVLTRSDKNRGKSDNVPSEEVVKKMKNYWRQLLNAKLITQRKFDNLTKAERGGLSELDKAGFIKRQLVETRQITKHVAQILDSRMNTKYDENDKLIREVKVITLKSKLVSDFRKDFQFYKVREINNYHHAHDAYLNAVVGTALIKKYPKLESEFVYGDYKVYDVRKMIAKSEQEIGKATAKYFFYSNIMNFFKTEITLANGEIRKRPLIETNGETGEIVWDKGRDFATVRKVLSMPQVNIVKKTEVQTGGFSKESILPKGNSDKLIARKKDWDPKKYGGFNSPTVAYSVLVVAKVEKGKSKKLKSVKELLGITIMERSSFEKNPIDFLEAKGYKEVKKDLIIKLPKYSLFELENGRKRMLASAGVLQKGNELALPSKYVNFLYLASHYEKLKGSPEDNEQKQLFVEQHKHYLDEIIEQISEFSKRVILADANLDKVLSAYNKHRDKPIREQAENIIHLFTLTNLGAPAAFKYFDTTINRKQYNTTKEVLDATLIRQSITGLYETRIDLSQLGGD

SEQ ID NO: 18248 - protein, 1368 aa, Streptococcus pyogenes
MDKKYSIGLDIGTNSVGWAVITDEYKVPSKKFKVLGNTDRHSIKKNLIGALLFDSGETAEATRLKRTARRRYTRRKNRICYLQEIFSNEMAKVDDSFFHRLEESFLVEEDKKHERHPIFGNIVDEVAYHEKYPTIYHLRKKLVDSTDKADLRLIYLALAHMIKFRGHFLIEGDLNPDNSDVDKLFIQLVQTYNQLFEENPINASGVDAKAILSARLSKSRRLENLIAQLPGEKKNGLFGNLIALSLGLTPNFKSNFDLAEDAKLQLSKDTYDDDLDNLLAQIGDQYADLFLAAKNLSDAILLSDILRVNTEITKAPLSASMIKRYDEHHQDLTLLKALVRQQLPEKYKEIFFDQSKNGYAGYIDGGASQEEFYKFIKPILEKMDGTEELLVKLNREDLLRKQRTFDNGSIPHQIHLGELHAILRRQEDFYPFLKDNREKIEKILTFRIPYYVGPLARGNSRFAWMTRKSEETITPWNFEEVVDKGASAQSFIERMTNFDKNLPNEKVLPKHSLLYEYFTVYNELTKVKYVTEGMRKPAFLSGEQKKAIVDLLFKTNRKVTVKQLKEDYFKKIECFDSVEISGVEDRFNASLGTYHDLLKIIKDKDFLDNEENEDILEDIVLTLTLFEDREMIEERLKTYAHLFDDKVMKQLKRRRYTGWGRLSRKLINGIRDKQSGKTILDFLKSDGFANRNFMQLIHDDSLTFKEDIQKAQVSGQGDSLHEHIANLAGSPAIKKGILQTVKVVDELVKVMGRHKPENIVIEMARENQTTQKGQKNSRERMKRIEEGIKELGSQILKEHPVENTQLQNEKLYLYYLQNGRDMYVDQELDINRLSDYDVDHIVPQSFLKDDSIDNKVLTRSDKNRGKSDNVPSEEVVKKMKNYWRQLLNAKLITQRKFDNLTKAERGGLSELDKAGFIKRQLVETRQITKHVAQILDSRMNTKYDENDKLIREVKVITLKSKLVSDFRKDFQFYKVREINNYHHAHDAYLNAVVGTALIKKYPKLESEFVYGDYKVYDVRKMIAKSEQEIGKATAKYFFYSNIMNFFKTEITLANGEIRKRPLIETNGETGEIVWDKGRDFATVRKVLSMPQVNIVKKTEVQTGGFSKESILPKRNSDKLIARKKDWDPKKYGGFDSPTVAYSVLVVAKVEKGKSKKLKSVKELLGITIMERSSFEKNPIDFLEAKGYKEVKKDLIIKLPKYSLFELENGRKRMLASARELQKGNELALPSKYVNFLYLASHYEKLKGSPEDNEQKQLFVEQHKHYLDEIIEQISEFSKRVILADAQLDKVLSAYNKHRDKPIREQAENIIHLFTLTNLGAPAAFKYFDTTFKQKQYRSTKEVLDATLIHQSITGLYETRIDLSQLGGD

SEQ ID NO: 18249 - protein, 1368 aa, Streptococcus pyogenes
MDKKYSIGLDIGTNSVGWAVITDEYKVPSKKFKVLGNTDRHSIKKNLIGALLFDSGETAEATRLKRTARRRYTRRKNRICYLQEIFSNEMAKVDDSFFHRLEESFLVEEDKKHERHPIFGNIVDEVAYHEKYPTIYHLRKKLVDSTDKADLRLIYLALAHMIKFRGHFLIEGDLNPDNSDVDKLFIQLVQTYNQLFEENPINASGVDAKAILSARLSKSRRLENLIAQLPGEKKNGLFGNLIALSLGLTPNFKSNFDLAEDAKLQLSKDTYDDDLDNLLAQIGDQYADLFLAAKNLSDAILLSDILRVNTEITKAPLSASMIKRYDEHHQDLTLLKALVRQQLPEKYKEIFFDQSKNGYAGYIDGGASQEEFYKFIKPILEKMDGTEELLVKLNREDLLRKQRTFDNGSIPHQIHLGELHAILRRQEDFYPFLKDNREKIEKILTFRIPYYVGPLARGNSRFAWMTRKSEETITPWNFEEVVDKGASAQSFIERMTNFDKNLPNEKVLPKHSLLYEYFTVYNELTKVKYVTEGMRKPAFLSGEQKKAIVDLLFKTNRKVTVKQLKEDYFKKIECFDSVEISGVEDRFNASLGTYHDLLKIIKDKDFLDNEENEDILEDIVLTLTLFEDREMIEERLKTYAHLFDDKVMKQLKRRRYTGWGRLSRKLINGIRDKQSGKTILDFLKSDGFANRNFMQLIHDDSLTFKEDIQKAQVSGQGDSLHEHIANLAGSPAIKKGILQTVKVVDELVKVMGRHKPENIVIEMARENQTTQKGQKNSRERMKRIEEGIKELGSQILKEHPVENTQLQNEKLYLYYLQNGRDMYVDQELDINRLSDYDVDHIVPQSFLKDDSIDNKVLTRSDKNRGKSDNVPSEEVVKKMKNYWRQLLNAKLITQRKFDNLTKAERGGLSELDKAGFIKRQLVETRQITKHVAQILDSRMNTKYDENDKLIREVKVITLKSKLVSDFRKDFQFYKVREINNYHHAHDAYLNAVVGTALIKKYPKLESEFVYGDYKVYDVRKMIAKSEQEIGKATAKYFFYSNIMNFFKTEITLANGEIRKRPLIETNGETGEIVWDKGRDFATVRKVLSMPQVNIVKKTEVQTGGFSKESILPKRNSDKLIARKKDWDPKKYGGFLWPTVAYSVLVVAKVEKGKSKKLKSVKELLGITIMERSSFEKNPIDFLEAKGYKEVKKDLIIKLPKYSLFELENGRKRMLASAKQLQKGNELALPSKYVNFLYLASHYEKLKGSPEDNEQKQLFVEQHKHYLDEIIEQISEFSKRVILADANLDKVLSAYNKHRDKPIREQAENIIHLFTLTNLGAPAAFKYFDTTIDRKQYRSTKEVLDATLIHQSITGLYETRIDLSQLGGD

SEQ ID NO: 18250 - protein, 1368 aa, Streptococcus pyogenes
MDKKYSIGLDIGTNSVGWAVITDEYKVPSKKFKVLGNTDRHSIKKNLIGALLFDSGETAEATRLKRTARRRYTRRKNRICYLQEIFSNEMAKVDDSFFHRLEESFLVEEDKKHERHPIFGNIVDEVAYHEKYPTIYHLRKKLVDSTDKADLRLIYLALAHMIKFRGHFLIEGDLNPDNSDVDKLFIQLVQTYNQLFEENPINASGVDAKAILSARLSKSRRLENLIAQLPGEKKNGLFGNLIALSLGLTPNFKSNFDLAEDAKLQLSKDTYDDDLDNLLAQIGDQYADLFLAAKNLSDAILLSDILRVNTEITKAPLSASMIKRYDEHHQDLTLLKALVRQQLPEKYKEIFFDQSKNGYAGYIDGGASQEEFYKFIKPILEKMDGTEELLVKLNREDLLRKQRTFDNGSIPHQIHLGELHAILRRQEDFYPFLKDNREKIEKILTFRIPYYVGPLARGNSRFAWMTRKSEETITPWNFEEVVDKGASAQSFIERMTNFDKNLPNEKVLPKHSLLYEYFTVYNELTKVKYVTEGMRKPAFLSGEQKKAIVDLLFKTNRKVTVKQLKEDYFKKIECFDSVEISGVEDRFNASLGTYHDLLKIIKDKDFLDNEENEDILEDIVLTLTLFEDREMIEERLKTYAHLFDDKVMKQLKRRRYTGWGRLSRKLINGIRDKQSGKTILDFLKSDGFANRNFMQLIHDDSLTFKEDIQKAQVSGQGDSLHEHIANLAGSPAIKKGILQTVKVVDELVKVMGRHKPENIVIEMARENQTTQKGQKNSRERMKRIEEGIKELGSQILKEHPVENTQLQNEKLYLYYLQNGRDMYVDQELDINRLSDYDVDHIVPQSFLKDDSIDNKVLTRSDKNRGKSDNVPSEEVVKKMKNYWRQLLNAKLITQRKFDNLTKAERGGLSELDKAGFIKRQLVETRQITKHVAQILDSRMNTKYDENDKLIREVKVITLKSKLVSDFRKDFQFYKVREINNYHHAHDAYLNAVVGTALIKKYPKLESEFVYGDYKVYDVRKMIAKSEQEIGKATAKYFFYSNIMNFFKTEITLANGEIRKRPLIETNGETGEIVWDKGRDFATVRKVLSMPQVNIVKKTEVQTGGFSKESILPKRNSDKLIARKKDWDPKKYGGFVSPTVAYSVLVVAKVEKGKSKKLKSVKELLGITIMERSSFEKNPIDFLEAKGYKEVKKDLIIKLPKYSLFELENGRKRMLASAGELQKGNELALPSKYVNFLYLASHYEKLKGSPEDNEQKQLFVEQHKHYLDEIIEQISEFSKRVILADANLDKVLSAYNKHRDKPIREQAENIIHLFTLTNLGAPAAFKYFDTTIDRKQYRSTKEVLDATLIHQSITGLYETRIDLSQLGGD

SEQ ID NO: 18251 - protein, 1368 aa, Streptococcus pyogenes
MDKKYSIGLDIGTNSVGWAVITDEYKVPSKKFKVLGNTDRHSIKKNLIGALLFDSGETAEATRLKRTARRRYTRRKNRICYLQEIFSNEMAKVDDSFFHRLEESFLVEEDKKHERHPIFGNIVDEVAYHEKYPTIYHLRKKLVDSTDKADLRLIYLALAHMIKFRGHFLIEGDLNPDNSDVDKLFIQLVQTYNQLFEENPINASGVDAKAILSARLSKSRRLENLIAQLPGEKKNGLFGNLIALSLGLTPNFKSNFDLAEDAKLQLSKDTYDDDLDNLLAQIGDQYADLFLAAKNLSDAILLSDILRVNTEITKAPLSASMIKRYDEHHQDLTLLKALVRQQLPEKYKEIFFDQSKNGYAGYIDGGASQEEFYKFIKPILEKMDGTEELLVKLNREDLLRKQRTFDNGSIPHQIHLGELHAILRRQEDFYPFLKDNREKIEKILTFRIPYYVGPLARGNSRFAWMTRKSEETITPWNFEEVVDKGASAQSFIERMTNFDKNLPNEKVLPKHSLLYEYFTVYNELTKVKYVTEGMRKPAFLSGEQKKAIVDLLFKTNRKVTVKQLKEDYFKKIECFDSVEISGVEDRFNASLGTYHDLLKIIKDKDFLDNEENEDILEDIVLTLTLFEDREMIEERLKTYAHLFDDKVMKQLKRRRYTGWGRLSRKLINGIRDKQSGKTILDFLKSDGFANRNFMQLIHDDSLTFKEDIQKAQVSGQGDSLHEHIANLAGSPAIKKGILQTVKVVDELVKVMGRHKPENIVIEMARENQTTQKGQKNSRERMKRIEEGIKELGSQILKEHPVENTQLQNEKLYLYYLQNGRDMYVDQELDINRLSDYDVDHIVPQSFLKDDSIDNKVLTRSDKNRGKSDNVPSEEVVKKMKNYWRQLLNAKLITQRKFDNLTKAERGGLSELDKAGFIKRQLVETRQITKHVAQILDSRMNTKYDENDKLIREVKVITLKSKLVSDFRKDFQFYKVREINNYHHAHDAYLNAVVGTALIKKYPKLESEFVYGDYKVYDVRKMIAKSEQEIGKATAKYFFYSNIMNFFKTEITLANGEIRKRPLIETNGETGEIVWDKGRDFATVRKVLSMPQVNIVKKTEVQTGGFSKESILPKRNSDKLIARKKDWDPKKYGGFVSPTVAYSVLVVAKVEKGKSKKLKSVKELLGITIMERSSFEKNPIDFLEAKGYKEVKKDLIIKLPKYSLFELENGRKRMLASARELQKGNELALPSKYVNFLYLASHYEKLKGSPEDNEQKQLFVEQHKHYLDEIIEQISEFSKRVILADANLDKVLSAYNKHRDKPIREQAENIIHLFTLTNLGAPAAFKYFDTTIDRKEYRSTKEVLDATLIHQSITGLYETRIDLSQLGGD

SEQ ID NO: 18252 - protein, 1368 aa, Streptococcus pyogenes
MDKKYSIGLDIGTNSVGWAVITDEYKVPSKKFKVLGNTDRHSIKKNLIGALLFDSGETAEATRLKRTARRRYTRRKNRICYLQEIFSNEMAKVDDSFFHRLEESFLVEEDKKHERHPIFGNIVDEVAYHEKYPTIYHLRKKLVDSTDKADLRLIYLALAHMIKFRGHFLIEGDLNPDNSDVDKLFIQLVQTYNQLFEENPINASGVDAKAILSARLSKSRRLENLIAQLPGEKKNGLFGNLIALSLGLTPNFKSNFDLAEDTKLQLSKDTYDDDLDNLLAQIGDQYADLFLAAKNLSDAILLSDILRVNTEITKAPLSASMIKLYDEHHQDLTLLKALVRQQLPEKYKEIFFDQSKNGYAGYIDGGASQEEFYKFIKPILEKMDGTEELLVKLNREDLLRKQRTFDNGIIPHQIHLGELHAILRRQEDFYPFLKDNREKIEKILTFRIPYYVGPLARGNSRFAWMTRKSEETITPWNFEKVVDKGASAQSFIERMTNFDKNLPNEKVLPKHSLLYEYFTVYNELTKVKYVTEGMRKPAFLSGDQKKAIVDLLFKTNRKVTVKQLKEDYFKKIECFDSVEISGVEDRFNASLGTYHDLLKIIKDKDFLDNEENEDILEDIVLTLTLFEDREMIEERLKTYAHLFDDKVMKQLKRRRYTGWGRLSRKLINGIRDKQSGKTILDFLKSDGFANRNFIQLIHDDSLTFKEDIQKAQVSGQGDSLHEHIANLAGSPAIKKGILQTVKVVDELVKVMGRHKPENIVIEMARENQTTQKGQKNSRERMKRIEEGIKELGSQILKEHPVENTQLQNEKLYLYYLQNGRDMYVDQELDINRLSDYDVDHIVPQSFLKDDSIDNKVLTRSDKNRGKSDNVPSEEVVKKMKNYWRQLLNAKLITQRKFDNLTKAERGGLSELDKAGFIKRQLVETRQITKHVAQILDSRMNTKYDENDKLIREVKVITLKSKLVSDFRKDFQFYKVREINNYHHAHDAYLNAVVGTALIKKYPKLESEFVYGDYKVYDVRKMIAKSEQEIGKATAKYFFYSNIMNFFKTEITLANGEIRKRPLIETNGETGEIVWDKGRDFATVRKVLSMPQVNIVKKTEVQTGGFSKESILPKRNSDKLIARKKDWDPKKYGGFDSPTVAYSVLVVAKVEKGKSKKLKSVKELLGITIMERSSFEKNPIDFLEAKGYKEVKKDLIIKLPKYSLFELENGRKRMLASAGVLQKGNELALPSKYVNFLYLASHYEKLKGSPEDNEQKQLFVEQHKHYLDEIIEQISEFSKRVILADANLDKVLSAYNKHRDKPIREQAENIIHLFTLTNLGAPAAFKYFDTTIDRKRYTSTKEVLDATLIHQSITGLYETRIDLSQLGGD

SEQ ID NO: 18253 - protein, 1368 aa, Streptococcus pyogenes
MDKKYSIGLDIGTNSVGWAVITDEYKVPSKKFKVLGNTDRHSIKKNLIGALLFDSGETAEATRLKRTARRRYTRRKNRICYLQEIFSNEMAKVDDSFFHRLEESFLVEEDKKHERHPIFGNIVDEVAYHEKYPTIYHLRKKLVDSTDKADLRLIYLALAHMIKFRGHFLIEGDLNPDNSDVDKLFIQLVQTYNQLFEENPINASGVDAKAILSARLSKSRRLENLIAQLPGEKKNGLFGNLIALSLGLTPNFKSNFDLAEDTKLQLSKDTYDDDLDNLLAQIGDQYADLFLAAKNLSDAILLSDILRVNTEITKAPLSASMIKLYDEHHQDLTLLKALVRQQLPEKYKEIFFDQSKNGYAGYIDGGASQEEFYKFIKPILEKMDGTEELLVKLNREDLLRKQRTFDNGIIPHQIHLGELHAILRRQEDFYPFLKDNREKIEKILTFRIPYYVGPLARGNSRFAWMTRKSEETITPWNFEKVVDKGASAQSFIERMTNFDKNLPNEKVLPKHSLLYEYFTVYNELTKVKYVTEGMRKPAFLSGDQKKAIVDLLFKTNRKVTVKQLKEDYFKKIECFDSVEISGVEDRFNASLGTYHDLLKIIKDKDFLDNEENEDILEDIVLTLTLFEDREMIEERLKTYAHLFDDKVMKQLKRRRYTGWGRLSRKLINGIRDKQSGKTILDFLKSDGFANRNFIQLIHDDSLTFKEDIQKAQVSGQGDSLHEHIANLAGSPAIKKGILQTVKVVDELVKVMGRHKPENIVIEMARENQTTQKGQKNSRERMKRIEEGIKELGSQILKEHPVENTQLQNEKLYLYYLQNGRDMYVDQELDINRLSDYDVDHIVPQSFLKDDSIDNKVLTRSDKNRGKSDNVPSEEVVKKMKNYWRQLLNAKLITQRKFDNLTKAERGGLSELDKAGFIKRQLVETRQITKHVAQILDSRMNTKYDENDKLIREVKVITLKSKLVSDFRKDFQFYKVREINNYHHAHDAYLNAVVGTALIKKYPKLESEFVYGDYKVYDVRKMIAKSEQEIGKATAKYFFYSNIMNFFKTEITLANGEIRKRPLIETNGETGEIVWDKGRDFATVRKVLSMPQVNIVKKTEVQTGGFSKESIRPKRNSDKLIARKKDWDPKKYGGFVSPTVAYSVLVVAKVEKGKSKKLKSVKELLGITIMERSSFEKNPIDFLEAKGYKEVKKDLIIKLPKYSLFELENGRKRMLASARFLQKGNELALPSKYVNFLYLASHYEKLKGSPEDNEQKQLFVEQHKHYLDEIIEQISEFSKRVILADANLDKVLSAYNKHRDKPIREQAENIIHLFTLTNLGAPRAFKYFDTTIDRKVYRSTKEVLDATLIHQSITGLYETRIDLSQLGGD

SEQ ID NO: 18254 - protein, 1122 aa, Streptococcus thermophilus
MSDLVLGLDIGIGSVGVGILNKVTGEIIHKNSRIFPAAQAENNLVRRTNRQGRRLARRKKHRRVRLNRLFEESGLITDFTKISINLNPYQLRVKGLTDELSNEELFIALKNMVKHRGISYLDDASDDGNSSVGDYAQIVKENSKQLETKTPGQIQLERYQTYGQLRGDFTVEKDGKKHRLINVFPTSAYRSEALRILQTQQEFNPQITDEFINRYLEILTGKRKYYHGPGNEKSRTDYGRYRTSGETLDNIFGILIGKCTFYPDEFRAAKASYTAQEFNLLNDLNNLTVPTETKKLSKEQKNQIINYVKNEKAMGPAKLFKYIAKLLSCDVADIKGYRIDKSGKAEIHTFEAYRKMKTLETLDIEQMDRETLDKLAYVLTLNTEREGIQEALEHEFADGSFSQKQVDELVQFRKANSSIFGKGWHNFSVKLMMELIPELYETSEEQMTILTRLGKQKTTSSSNKTKYIDEKLLTEEIYNPVVAKSVRQAIKIVNAAIKEYGDFDNIVIEMARETNEDDEKKAIQKIQKANKDEKDAAMLKAANQYNGKAELPHSVFHGHKQLATKIRLWHQQGERCLYTGKTISIHDLINNSNQFEVDHILPLSITFDDSLANKVLVYATANQEKGQRTPYQALDSMDDAWSFRELKAFVRESKTLSNKKKEYLLTEEDISKFDVRKKFIERNLVDTRYASRVVLNALQEHFRAHKIDTKVSVVRGQFTSQLRRHWGIEKTRDTYHHHAVDALIIAASSQLNLWKKQKNTLVSYSEEQLLDIETGELISDDEYKESVFKAPYQHFVDTLKSKEFEDSILFSYQVDSKFNRKISDATIYATRQAKVGKDKKDETYVLGKIKDIYTQDGYDAFMKIYKKDKSKFLMYRHDPQTFEKVIEPILENYPNKQMNEKGKEVPCNPFLKYKEEHGYIRKYSKKGNGPEIKSLKYYDSKLLGNPIDITPENSKNKVVLQSLKPWRTDVYFNKATGKYEILGLKYADLQFEKGTGTYKISQEKYNDIKKKEGVDSDSEFKFTLYKNDLLLVKDTETKEQQLFRFLSRTLPKQKHYVELKPYDKQKFEGGEALIKVLGNVANGGQCIKGLAKSNISIYKVRTDVLGNQHIIKNEGDKPKLDF

SEQ ID NO: 18255 - protein, 1122 aa, Streptococcus thermophilus
MSDLVLGLDIGIGSVGVGILNKVTGEIIHKNSRIFPAAQAENNLVRRTNRQGRRLARRKKHRRVRLNRLFEESGLITDFTKISINLNPYQLRVKGLTDELSNEELFIALKNMVKHRGISYLDDASDDGNSSVGDYAQIVKENSKQLETKTPGQIQLERYQTYGQLRGDFTVEKDGKKHRLINVFPTSAYRSEALRILQTQQEFNPQITDEFINRYLEILTGKRKYYHGPGNEKSRTDYGRYRTSGETLDNIFGILIGKCTFYPDEFRAAKASYTAQEFNLLNDLNNLTVPTETKKLSKEQKNQIINYVKNEKAMGPAKLFKYIAKLLSCDVADIKGYRIDKSGKAEIHTFEAYRKMKTLETLDIEQMDRETLDKLAYVLTLNTEREGIQEALEHEFADGSFSQKQVDELVQFRKANSSIFGKGWHNFSVKLMMELIPELYETSEEQMTILTRLGKQKTTSSSNKTKYIDEKLLTEEIYNPVVAKSVRQAIKIVNAAIKEYGDFDNIVIEMARETNEDDEKKAIQKIQKANKDEKDAAMLKAANQYNGKAELPHSVFHGHKQLATKIRLWHQQGERCLYTGKTISIHDLINNSNQFEVDHILPLSITFDDSLANKVLVYATANQEKGQRTPYQALDSMDDAWSFRELKAFVRESKTLSNKKKEYLLTEEDISKFDVRKKFIERNLVDTRYASRVVLNALQEHFRAHKIDTKVSVVRGQFTSQLRRHWGIEKTRDTYHHHAVDALIIAASSQLNLWKKQKNTLVSYSEEQLLDIETGELISDDEYKESVFKAPYQHFVDTLKSKEFEDSILFSYQVDSKFNRKISDATIYATRQAKVGKDKKDETYVLGKIKDIYTQDGYDAFMKIYKKDKSKFLMYRHDPQTFEKVIEPILENYPNKQMNEKGKEVPCNPFLKYKEEHGYIRKYSKKGNGPEIKSLKYYDSKLLGNPIDITPENSKNKVVLQSLKPWRTDVYFNKNTGKYEILGLKYADLQFEKKTGTYKISQEKYNGIMKEEGVDSDSEFKFTLYKNDLLLVKDTETKEQQLFRFLSRTMPNVKYYVELKPYSKDKFEKNESLIEILGSADKSGRCIKGLGKSNISIYKVRTDVLGNQHIIKNEGDKPKLDF

SEQ ID NO: 18256 - protein, 1120 aa, Streptococcus thermophilus
MSDLVLGLDIGIGSVGVGILNKVTGEIIHKNSRIFPAAQAENNLVRRTNRQGRRLARRKKHRRVRLNRLFEESGLITDFTKISINLNPYQLRVKGLTDELSNEELFIALKNMVKHRGISYLDDASDDGNSSVGDYAQIVKENSKQLETKTPGQIQLERYQTYGQLRGDFTVEKDGKKHRLINVFPTSAYRSEALRILQTQQEFNPQITDEFINRYLEILTGKRKYYHGPGNEKSRTDYGRYRTSGETLDNIFGILIGKCTFYPDEFRAAKASYTAQEFNLLNDLNNLTVPTETKKLSKEQKNQIINYVKNEKAMGPAKLFKYIAKLLSCDVADIKGYRIDKSGKAEIHTFEAYRKMKTLETLDIEQMDRETLDKLAYVLTLNTEREGIQEALEHEFADGSFSQKQVDELVQFRKANSSIFGKGWHNFSVKLMMELIPELYETSEEQMTILTRLGKQKTTSSSNKTKYIDEKLLTEEIYNPVVAKSVRQAIKIVNAAIKEYGDFDNIVIEMARETNEDDEKKAIQKIQKANKDEKDAAMLKAANQYNGKAELPHSVFHGHKQLATKIRLWHQQGERCLYTGKTISIHDLINNSNQFEVDHILPLSITFDDSLANKVLVYATANQEKGQRTPYQALDSMDDAWSFRELKAFVRESKTLSNKKKEYLLTEEDISKFDVRKKFIERNLVDTRYASRVVLNALQEHFRAHKIDTKVSVVRGQFTSQLRRHWGIEKTRDTYHHHAVDALIIAASSQLNLWKKQKNTLVSYSEDQLLDIETGELISDDEYKESVFKAPYQHFVDTLKSKEFEDSILFSYQVDSKFNRKISDATIYATRQAKVGKDKADETYVLGKIKDIYTQDGYDAFMKIYKKDKSKFLMYRHDPQTFEKVIEPILENYPNKQINEKGKEVPCNPFLKYKEEHGYIRKYSKKGNGPEIKSLKYYDSKLGNHIDITPKDSNNKVVLQSLKPWRTDVYFNKNTGKYEILGLKYSDMQFEKGTGKYSISKEQYENIKVREGVDENSEFKFTLYKNDLLLLKDSENGEQILLRFTSRNDTSKHYVELKPYNRQKFEGSEYLIKSLGTVAKGGQCIKGLGKSNISIYKVRTDVLGNQHIIKNEGDKPKLDF

SEQ ID NO: 18257 - protein, 1120 aa, Streptococcus thermophilus
MSDLVLGLDIGIGSVGVGILNKVTGEIIHKNSRIFPAAQAENNLVRRTNRQGRRLARRKKHRRVRLNRLFEESGLITDFTKISINLNPYQLRVKGLTDELSNEELFIALKNMVKHRGISYLDDASDDGNSSVGDYAQIVKENSKQLETKTPGQIQLERYQTYGQLRGDFTVEKDGKKHRLINVFPTSAYRSEALRILQTQQEFNPQITDEFINRYLEILTGKRKYYHGPGNEKSRTDYGRYRTSGETLDNIFGILIGKCTFYPDEFRAAKASYTAQEFNLLNDLNNLTVPTETKKLSKEQKNQIINYVKNEKAMGPAKLFKYIAKLLSCDVADIKGYRIDKSGKAEIHTFEAYRKMKTLETLDIEQMDRETLDKLAYVLTLNTEREGIQEALEHEFADGSFSQKQVDELVQFRKANSSIFGKGWHNFSVKLMMELIPELYETSEEQMTILTRLGKQKTTSSSNKTKYIDEKLLTEEIYNPVVAKSVRQAIKIVNAAIKEYGDFDNIVIEMARETNEDDEKKAIQKIQKANKDEKDAAMLKAANQYNGKAELPHSVFHGHKQLATKIRLWHQQGERCLYTGKTISIHDLINNSNQFEVDHILPLSITFDDSLANKVLVYATANQEKGQRTPYQALDSMDDAWSFRELKAFVRESKTLSNKKKEYLLTEEDISKFDVRKKFIERNLVDTRYASRVVLNALQEHFRAHKIDTKVSVVRGQFTSQLRRHWGIEKTRDTYHHHAVDALIIAASSQLNLWKKQKNTLVSYSEDQLLDIETGELISDDEYKESVFKAPYQHFVDTLKSKEFEDSILFSYQVDSKFNRKISDATIYATRQAKVGKDKADETYVLGKIKDIYTQDGYDAFMKIYKKDKSKFLMYRHDPQTFEKVIEPILENYPNKQINEKGKEVPCNPFLKYKEEHGYIRKYSKKGNGPEIKSLKYYDSKLGNHIDITPKDSNNKVVLQSLKPWRTDVYFNKNTGKYEILGLKYSDMQFEKGTGKYSISKEQYENIKVREGVDENSEFKFTLYKNDLLLLKDSENGEQILLRFTSRNDTSKHYVELKPYNRQKFEGSEYLIKSLGTVVKGGRCIKGLGKSNISIYKVRTDVLGNQHIIKNEGDKPKLDF

SEQ ID NO: 18258 - protein, 1057 aa, Staphylococcus sp.
MNQKFILGLDIGITSVGYGLIDYETKNIIDAGVRLFPEANVENNEGRRSKRGSRRLKRRRIHRLERVKLLLTEYDLINKEQIPTSNNPYQIRVKGLSEILSKDELAIALLHLAKRRGIHNVDVAADKEETASDSLSTKDQINKNAKFLESRYVCELQKERLENEGHVRGVENRFLTKDIVREAKKIIDTQMQYYPEIDETFKEKYISLVETRREYFEGPGQGSPFGWNGDLKKWYEMLMGHCTYFPQELRSVKYAYSADLFNALNDLNNLIIQRDNSEKLEYHEKYHIIENVFKQKKKPTLKQIAKEIGVNPEDIKGYRITKSGTPEFTSFKLFHDLKKVVKDHAILDDIDLLNQIAEILTIYQDKDSIVAELGQLEYLMSEADKQSISELTGYTGTHSLSLKCMNMIIDELWHSSMNQMEVFTYLNMRPKKYELKGYQRIPTDMIDDAILSPVVKRTFIQSINVINKVIEKYGIPEDIIIELARENNSDDRKKFINNLQKKNEATRKRINEIIGQTGNQNAKRIVEKIRLHDQQEGKCLYSLESIPLEDLLNNPNHYEVDHIIPRSVSFDNSYHNKVLVKQSENSKKSNLTPYQYFNSGKSKLSYNQFKQHILNLSKSQDRISKKKKEYLLEERDINKFEVQKEFINRNLVDTRYATRELTNYLKAYFSANNMNVKVKTINGSFTDYLRKVWKFKKERNHGYKHHAEDALIIANADFLFKENKKLKAVNSVLEKPEIETKQLDIQVDSEDNYSEMFIIPKQVQDIKDFRNFKYSHRVDKKPNRQLINDTLYSTRKKDNSTYIVQTIKDIYAKDNTTLKKQFDKSPEKFLMYQHDPRTFEKLEVIMKQYANEKNPLAKYHEETGEYLTKYSKKNNGPIVKSLKYIGNKLGSHLDVTHQFKSSTKKLVKLSIKNYRFDVYLTEKGYKFVTIAYLNVFKKDNYYYIPKDKYQELKEKKKIKDTDQFIASFYKNDLIKLNGDLYKIIGVNSDDRNIIELDYYDIKYKDYCEINNIKGEPRIKKTIGKKTESIEKFTTDVLGNLYLHSTEKAPQLIFKRGL

SEQ ID NO: 18259 - protein, 1057 aa, Staphylococcus sp.
MNQKFILGLDIGITSVGYGLIDYETKNIIDAGVRLFPEANVENNEGRRSKRGSRRLKRRRIHRLERVKLLLTEYDLINKEQIPTSNNPYQIRVKGLSEILSKDELAIALLHLAKRRGIHNVDVAADKEETASDSLSTKDQINKNAKFLESRYVCELQKERLENEGHVRGVENRFLTKDIVREAKKIIDTQMQYYPEIDETFKEKYISLVETRREYFEGPGQGSPFGWNGDLKKWYEMLMGHCTYFPQELRSVKYAYSADLFNALNDLNNLIIQRDNSEKLEYHEKYHIIENVFKQKKKPTLKQIAKEIGVNPEDIKGYRITKSGTPEFTSFKLFHDLKKVVKDHAILDDIDLLNQIAEILTIYQDKDSIVAELGQLEYLMSEADKQSISELTGYTGTHSLSLKCMNMIIDELWHSSMNQMEVFTYLNMRPKKYELKGYQRIPTDMIDDAILSPVVKRTFIQSINVINKVIEKYGIPEDIIIELARENNSDDRKKFINNLQKKNEATRKRINEIIGQTGNQNAKRIVEKIRLHDQQEGKCLYSLESIPLEDLLNNPNHYEVDHIIPRSVSFDNSYHNKVLVKQSENSKKSNLTPYQYFNSGKSKLSYNQFKQHILNLSKSQDRISKKKKEYLLEERDINKFEVQKEFINRNLVDTRYATRELTSYLKAYFSANNMDVKVKTINGSFTNHLRKVWRFDKYRNHGYKHHAEDALIIANADFLFKENKKLQNTNKILEKPTIENNTKKVTVEKEEDYNNVFETPKLVEDIKQYRDYKFSHRVDKKPNRQLINDTLYSTRMKDEHDYIVQTITDIYGKDNTNLKKQFNKNPEKFLMYQNDPKTFEKLSIIMKQYSDEKNPLAKYYEETGEYLTKYSKKNNGPIVKKIKLLGNKVGNHLDVTNKYENSTKKLVKLSIKNYRFDVYLTEKGYKFVTIAYLNVFKKDNYYYIPKDKYQELKEKKKIKDTDQFIASFYKNDLIKLNGDLYKIIGVNSDDRNIIELDYYDIKYKDYCEINNIKGEPRIKKTIGKKTESIEKFTTDVLGNLYLHSTEKAPQLIFKRGL

SEQ ID NO: 18260 - protein, 1367 aa, unidentified
DKKYSIGLDIGTNSVGWAVITDEYKVPSKKFKVLGNTDRHSIKKNLIGALLFDSGETAEATRLKRTARRRYTRRKNRICYLQEIFSNEMAKVDDSFFHRLEESFLVEEDKKHERHPIFGNIVDEVAYHEKYPTIYHLRKKLVDSTDKADLRLIYLALAHMIKFRGHFLIEGDLNPDNSDVDKLFIQLVQTYNQLFEENPINASGVDAKAILSARLSKSRRLENLIAQLPGEKKNGLFGNLIALSLGLTPNFKSNFDLAEDAKLQLSKDTYDDDLDNLLAQIGDQYADLFLAAKNLSDAILLSDILRVNTEITKAPLSASMIKRYDEHHQDLTLLKALVRQQLPEKYKEIFFDQSKNGYAGYIDGGASQEEFYKFIKPILEKMDGTEELLVKLNREDLLRKQRTFDNGSIPHQIHLGELHAILRRQEDFYPFLKDNREKIEKILTFRIPYYVGPLARGNSRFAWMTRKSEETITPWNFEEVVDKGASAQSFIERMTNFDKNLPNEKVLPKHSLLYEYFTVYNELTKVKYVTEGMRKPAFLSGEQKKAIVDLLFKTNRKVTVKQLKEDYFKKIECFDSVEISGVEDRFNASLGTYHDLLKIIKDKDFLDNEENEDILEDIVLTLTLFEDREMIEERLKTYAHLFDDKVMKQLKRRRYTGWGRLSRKLINGIRDKQSGKTILDFLKSDGFANRNFMQLIHDDSLTFKEDIQKAQVSGQGDSLHEHIANLAGSPAIKKGILQTVKVVDELVKVMGRHKPENIVIEMARENQTTQKGQKNSRERMKRIEEGIKELGSQILKEHPVENTQLQNEKLYLYYLQNGRDMYVDQELDINRLSDYDVDAIVPQSFLKDDSIDNKVLTRSDKNRGKSDNVPSEEVVKKMKNYWRQLLNAKLITQRKFDNLTKAERGGLSELDKAGFIKRQLVETRQITKHVAQILDSRMNTKYDENDKLIREVKVITLKSKLVSDFRKDFQFYKVREINNYHHAHDAYLNAVVGTALIKKYPKLESEFVYGDYKVYDVRKMIAKSEQEIGKATAKYFFYSNIMNFFKTEITLANGEIRKRPLIETNGETGEIVWDKGRDFATVRKVLSMPQVNIVKKTEVQTGGFSKESILPKRNSDKLIARKKDWDPKKYGGFDSPTVAYSVLVVAKVEKGKSKKLKSVKELLGITIMERSSFEKNPIDFLEAKGYKEVKKDLIIKLPKYSLFELENGRKRMLASAGELQKGNELALPSKYVNFLYLASHYEKLKGSPEDNEQKQLFVEQHKHYLDEIIEQISEFSKRVILADANLDKVLSAYNKHRDKPIREQAENIIHLFTLTNLGAPAAFKYFDTTIDRKRYTSTKEVLDATLIHQSITGLYETRIDLSQLGGD

SEQ ID NO: 18261 - protein, 107 aa, synthetic construct
GVQVETISPGDGRTFPKRGQTCVVHYTGMLEDGKKFDSSRDRNKPFKFMLGKQEVIRGWEEGVAQMSVGQRAKLTISPDYAYGATGHPGIIPPHATLVFDVELLKLE

SEQ ID NO: 18262 - protein, 93 aa, synthetic construct [sequence omitted]

SEQ ID NO: 18263 - protein, 91 aa, synthetic construct
EMWHEGLEEASRLYFGERNVKGMFEVLEPLHAMMERGPQTLKETSFNQAYGRDLMEAQEWCRKYMKSGNVKDLTQAWDLYYHVFRRISKQL

SEQ ID NO: 18264 - protein, 92 aa, synthetic construct
ILWHEMWHEGLEEASRLYFGERNVKGMFEVLEPLHAMMERGPQTLKETSFNQAYGRDLMEAQEWCRKYMKSGNVKDLLQAWDLYYHVFRRIS

SEQ ID NO: 18265 - protein, 93 aa, synthetic construct
ILWHEMWHEGLEEASRLYFGERNVKGMFEVLEPLHAMMERGPQTLKETSFNQAYGRDLMEAQEWCRKYMKSGNVKDLLQAWDLYYHVFRRISK

SEQ ID NO: 18266 - protein, 109 aa, synthetic construct
SRGVQVETISPGDGRTFPKRGQTCVVHYTGMLEDGKKFDSSRDRNKPFKFMLGKQEVIRGWEEGVAQMSVGQRAKLTISPDYAYGATGHPGIIPPHATLVFDVELLKLE

SEQ ID NO: 18267 - protein, 297 aa, synthetic construct
PLYGFTSICGRRPEMEAAVSTIPRFLQSSSGSMLDGRFDPQSAAHFFGVYDGHGGSQVANYCRERMHLALAEEIAKEKPMLCDGDTWLEKWKKALFNSFLRVDSEIESVAPETVGSTSVVAVVFPSHIFVANCGDSRAVLCRGKTALPLSVDHKPDREDEAARIEAAGGKVIQWNGARVFGVLAMSRSIGDRYLKPSIIPDPEVTAVKRVKEDDCLILASDGVWDVMTDEEACEMARKRILLWHKKNAVAGDASLLADERRKEGKDPAAMSAAEYLSKLAIQRGSKDNISVVVVDLK

SEQ ID NO: 18268 - protein, 179 aa, synthetic construct
APTQDEFTQLSQSIAEFHTYQLGNGRCSSLLAQRIHAPPETVWSVVRRFDRPQIYKHFIKSCNVSEDFEMRVGCTRDVNVISGLPANTSRERLDLLDDDRRVTGFSITGGEHRLRNYKSVTTVHRFEKEEEEERIWTVVLESYVVDVPEGNSEEDTRLFADTVIRLNLQKLASITEAMN

SEQ ID NO: 18269 - protein, 188 aa, synthetic construct
APTQDEFTQLSQSIAEFHTYQLGNGRCSSLLAQRIHAPPETVWSVVRRFDRPQIYKHFIKSCNVSEDFEMRVGCTRDVNVISGLPANTSRERLDLLDDDRRVTGFSITGGEHRLRNYKSVTTVHRFEKEEEEERIWTVVLESYVVDVPEGNSEEDTRLFADTVIRLNLQKLASITEAMNYPYDVPDYA

SEQ ID NO: 18270 - protein, 297 aa, synthetic construct
PLYGFTSICGRRPEMEDAVSTIPRFLQSSSGSMLDGRFDPQSAAHFFGVYDGHGGSQVANYCRERMHLALAEEIAKEKPMLCDGDTWLEKWKKALFNSFLRVDSEIGSVAPETVGSTSVVAVVFPSHIFVANCGDSRAVLCRGKTALPLSVDHKPDREDEAARIEAAGGKVIQWNGARVFGVLAMSRSIGDRYLKPSIIPDPEVTAVKRVKEDDCLILASDGVWDVMTDEEACEMARKRILLWHKKNAVAGDASLLADERRKEGKDPAAMSAAEYLSKLAIQRGSKDNISVVVVDLK

SEQ ID NO: 18271 - protein, 91 aa, synthetic construct
KRDHHHHHHQDKKTMMMNEEDDGNGMDELLAVLGYKVRSSEMADVAQKLEQLEVMMSNVQEDDLSQLATETVHYNPAELYTWLDSMLTDLN

SEQ ID NO: 18272 - protein, 344 aa, synthetic construct
AASDEVNLIESRTVVPLNTWVLISNFKVAYNILRRPDGTFNRHLAEYLDRKVTANANPVDGVFSFDVLIDRRINLLSRVYRPAYADQEQPPSILDLEKPVDGDIVPVILFFHGGSFAHSSANSAIYDTLCRRLVGLCKCVVVSVNYRRAPENPYPCAYDDGWIALNWVNSRSWLKSKKDSKVHIFLAGDSSGGNIAHNVALRAGESGIDVLGNILLNPMFGGNERTESEKSLDGKYFVTVRDRDWYWKAFLPEGEDREHPACNPFSPRGKSLEGVSFPKSLVVVAGLDLIRDWQLAYAEGLKKAGQEVKLMHLEKATVGFYLLPNNNHFHNVMDEISAFVNAEC

SEQ ID NO: 18273 - protein, 497 aa, synthetic construct
KMDKKTIVWFRRDLRIEDNPALAAAAHEGSVFPVFIWCPEEEGQFYPGRASRWWMKQSLAHLSQSLKALGSDLTLIKTHNTISAILDCIRVTGATKVVFNHLYDPVSLVRDHTVKEKLVERGISVQSYNGDLLYEPWEIYCEKGKPFTSFNSYWKKCLDMSIESVMLPPPWRLMPITAAAEAIWACSIEELGLENEAEKPSNALLTRAWSPGWSNADKLLNEFIEKQLIDYAKNSKKVVGNSTSLLSPYLHFGEISVRHVFQCARMKQIIWARDKNSEGEESADLFLRGIGLREYSRYICFNFPFTHEQSLLSHLRFFPWDADVDKFKAWRQGRTGYPLVDAGMRELWATGWMHNRIRVIVSSFAVKFLLLPWKWGMKYFWDTLLDADLECDILGWQYISGSIPDGHELDRLDNPALQGAKYDPEGEYIRQWLPELARLPTEWIHHPWDAPLTVLKASGVELGTNYAKPIVDIDTARELLAKAISRTREAQIMIGAA

SEQ ID NO: 18274 - protein, 169 aa, synthetic construct
NGAIGGDLLLNFPDMSVLERQRAHLKYLNPTFDSPLAGFFADSSMITGGEMDSYLSTAGLNLPMMYGETTVEGDSRLSISPETTLGTGNFKAAKFDTETKDCNEAAKKMTMNRDDLVEEGEEEKSKITEQNNGSTKSIKKMKHKAKKEENNFSNDSSKVTKELEKTDYI

SEQ ID NO: 18275 - protein, 169 aa, synthetic construct
NGAIGGDLLLNFPDMSVLERQRAHLKYLNPTFDSPLAGFFADSSMITGGEMDSYLSTAGLNLPMMYGETTVEGDSRLSISPETTLGTGNFKKRKFDTETKDCNEKKKKMTMNRDDLVEEGEEEKSKITEQNNGSTKSIKKMKHKAKKEENNFSNDSSKVTKELEKTDYI

SEQ ID NO: 18276 - protein, 150 aa, synthetic construct
HTLYAPGGYDIMGYLRQIRNRPNPQVELGPVDTSCALILCDLKQKDTPIVYASEAFLYMTGYSNAEVLGRNCRFLQSPDGMVKPKSTRKYVDSNTINTMRKAIDRNAEVQVEVVNFKKNGQRFVNFLTMIPVRDETGEYRYSMGFQCETE

SEQ ID NO: 18277 - protein, 150 aa, synthetic construct
HTLYAPGGYDIMGYLDQIGNRPNPQVELGPVDTSCALILCDLKQKDTPIVYASEAFLYMTGYSNAEVLGRNCRFLQSPDGMVKPKSTRKYVDSNTINTIRKAIDRNAEVQVEVVNFKKNGQRFVNFLTIIPVRDETGEYRYSMGFQCETE

SEQ ID NO: 18278 - protein, 150 aa, synthetic construct
HTLYAPGGYDIMGYLDQIGNRPNPQVELGPVDTSCALILCDLKQKDTPIVYASEAFLYMTGYSNAEVLGRNCRFLQSPDGMVKPKSTRKYVDSNTINTMRKAIDRNAEVQVEVVNFKKNGQRFVNFLTMIPVRDETGEYRYSMGFQCETE

SEQ ID NO: 18279 - protein, 150 aa, synthetic construct
HTLYAPGGYDIMGYLRQIRNRPNPQVELGPVDTSCALVLCDLKQKDTPVVYASEAFLYMTGYSNAEVLGRNCRFLQSPDGMVKPKSTRKYVDSNTINTMRKAIDRNAEVQVEVVNFKKNGQRFVNFLTMIPVRDETGEYRYSMGFQCETE

SEQ ID NO: 18280 - protein, 907 aa, synthetic construct
VSGVGGSGGGRGGGRGGEEEPSSSHTPNNRRGGEQAQSSGTKSLRPRSNTESMSKAIQQYTVDARLHAVFEQSGESGKSFDYSQSLKTTTYGSSVPEQQITAYLSRIQRGGYIQPFGCMIAVDESSFRIIGYSENAREMLGIMPQSVPTLEKPEILAMGTDVRSLFTSSSSILLERAFVAREITLLNPVWIHSKNTGKPFYAILHRIDVGVVIDLEPARTEDPALSIAGAVQSQKLAVRAISQLQALPGGDIKLLCDTVVESVRDLTGYDRVMVYKFHEDEHGEVVAESKRDDLEPYIGLHYPATDIPQASRFLFKQNRVRMIVDCNATPVLVVQDDRLTQSMCLVGSTLRAPHGCHSQYMANMGSIASLAMAVIINGNEDDGSNVASGRSSMRLWGLVVCHHTSSRCIPFPLRYACEFLMQAFGLQLNMELQLALQMSEKRVLRTQTLLCDMLLRDSPAGIVTQSPSIMDLVKCDGAAFLYHGKYYPLGVAPSEVQIKDVVEWLLANHADSTGLSTDSLGDAGYPGAAALGDAVCGMAVAYITKRDFLFWFRSHTAKEIKWGGAKHHPEDKDDGQRMHPRSSFQAFLEVVKSRSQPWETAEMDAIHSLQLILRDSFKESEAAMNSKVVDGVVQPCRDMAGEQGIDELGAVAREMVRLIETATVPIFAVDAGGCINGWNAKIAELTGLSVEEAMGKSLVSDLIYKENEATVNKLLSRALRGDEEKNVEVKLKTFSPELQGKAVFVVVNACSSKDYLNNIVGVCFVGQDVTSQKIVMDKFINIQGDYKAIVHSPNPLIPPIFAADENTCCLEWNMAMEKLTGWSRSEVIGKMIVGEVFGSCCMLKGPDALTKFMIVLHNAIGGQDTDKFPFPFFDRNGKFVQALLTANKRVSLEGKVIGAFCFLQIPS

SEQ ID NO: 18281 - protein, 99 aa, synthetic construct
MFLPTDYCCRLSDQEYMELVFENGQILAKGQRSNVSLHNQRTKSIMDLYEAEYNEDFMKSIIHGGGGAITNLGDTQVVPQSHVAAAHETNMLESNKHVD

SEQ ID NO: 18282 - protein, 620 aa, synthetic construct
VSGVGGSGGGRGGGRGGEEEPSSSHTPNNRRGGEQAQSSGTKSLRPRSNTESMSKAIQQYTVDARLHAVFEQSGESGKSFDYSQSLKTTTYGSSVPEQQITAYLSRIQRGGYIQPFGCMIAVDESSFRIIGYSENAREMLGIMPQSVPTLEKPEILAMGTDVRSLFTSSSSILLERAFVAREITLLNPVWIHSKNTGKPFYAILHRIDVGVVIDLEPARTEDPALSIAGAVQSQKLAVRAISQLQALPGGDIKLLCDTVVESVRDLTGYDRVMVYKFHEDEHGEVVAESKRDDLEPYIGLHYPATDIPQASRFLFKQNRVRMIVDCNATPVLVVQDDRLTQSMCLVGSTLRAPHGCHSQYMANMGSIASLAMAVIINGNEDDGSNVASGRSSMRLWGLVVCHHTSSRCIPFPLRYACEFLMQAFGLQLNMELQLALQMSEKRVLRTQTLLCDMLLRDSPAGIVTQSPSIMDLVKCDGAAFLYHGKYYPLGVAPSEVQIKDVVEWLLANHADSTGLSTDSLGDAGYPGAAALGDAVCGMAVAYITKRDFLFWFRSHTAKEIKWGGAKHHPEDKDDGQRMHPRSSFQAFLEVVKSRSQPWETAEMDAIHSLQLILRDSFKES

SEQ ID NO: 18283 - protein, 463 aa, synthetic construct
ASKSVHADITLLLDMEGVIREATLSPTMAAESVDGWLGRRWSDIAGAEGGDKVRRMVEDARRSGISAFRQINQPFPSGVEIPIEFTTMLLGDRTGMIAVGKNMQAVTELHSRLIAAQQAMERDYWRLRELETRYRLVFDAAADAVMIVSAGDMRIVEANRAAVNAISRVERGNDDLAGRDFLAEVAAADRDAVRDMLAQVRQRGTALSVLVHLGRYDRAWMLRGSLMSSERRQVFLLHFTPVTTTPAIDDVDDDAVLRGLIDRIPDGFVALDSEGVVRHANQAFLDLVQIGSKPAAVGRSLGVWMGRPGADLSSLLTLLRRYKTVRLFQTTIRGELGTETEVEVSAVDGEDDQYIGVLMRNVARRLDAADDHDALRQALGPISKQLGRSSLRKLVKNAVSIVEQHYVKEALLRSKGNRTATAELLGLSRQSLYAKLNSYGFDDKGVVASAADGAEGASDDAED

SEQ ID NO: 18284 - protein, 731 aa, synthetic construct
VAGHASGSPAFGTADLSNCEREEIHLAGSIQPHGALLVVSEPDHRIIQASANAAEFLNLGSVLGVPLAEIDGDLLIKILPHLDPTAEGMPVAVRCRIGNPSTEYDGLMHRPPEGGLIIELERAGPPIDLSGTLAPALERIRTAGSLRALCDDTALLFQQCTGYDRVMVYRFDEQGHGEVFSERHVPGLESYFGNRYPSSDIPQMARRLYERQRVRVLVDVSYQPVPLEPRLSPLTGRDLDMSGCFLRSMSPIHLQYLKNMGVRATLVVSLVVGGKLWGLVACHHYLPRFIHFELRAICELLAEAIATRITALESFAQSQSELFVQRLEQRMIEAITREGDWRAAIFDTSQSILQPLHADGCALVYEDQIRTIGDVPSTQDVREIAGWLDRQPRAAVTSTASLGLDVPELAHLTRMASGVVAAPISDHRGEFLMWFRPERVHTVTWGGDPKKPFTMGDTPADLSPRRSFAKWHQVVEGTSDPWTAADLAAARTIGQTVADIVLQFRAVRTLIAREQYEQFSSQVHASMQPVLITDAEGRILLMNDSFRDMLPAGSPSAVHLDDLAGFFVESNDFLRNVAELIDHGRGWRGEVLLRGAGNRPLPLAVRADPVTRTEDQSLGFVLIFSDATDRRTADAARTRFQEGILASARPGVRLDSKSDLLHEKLLSALVENAQLAALEITYGVETGRIAELLEGVRQSMLRTAEVLGHLVQHAARTAGSDSSSNGSQNKK

SEQ ID NO: 18285 - protein, 19 aa, synthetic construct
EELLSKNYHLENEVARLKK

SEQ ID NO: 18286 - protein, 246 aa, synthetic construct
GPDIVMTQSPSSLSASVGDRVTITCRSSTGAVTTSNYASWVQEKPGKLFKGLIGGTNNRAPGVPSRFSGSLIGDKATLTISSLQPEDFATYFCALWYSNHWVFGQGTKVELKRGGGGSGGGGSGGGGSSGGGSEVKLLESGGGLVQPGGSLKLSCAVSGFSLTDYGVNWVRQAPGRGLEWIGVIWGDGITDYNSALKDRFIISKDNGKNTVYLQMSKVRSDDTALYYCVTGLFDYWGQGTLVTVSS

SEQ ID NO: 18287 - protein, 22 aa, synthetic construct
LLPKNYHLENEVARLKKLVGER

SEQ ID NO: 18288 - protein, 15 aa, synthetic construct
KNEQELLELDKWASL

SEQ ID NO: 18289 - protein, 122 aa, synthetic construct
EVQLVESGGGLVQPGGSLRLSCAASGSISSVDVMSWYRQAPGKQRELVAFITDRGRTNYKVSVKGRFTISRDNSKNMVYLQMNSLKPEDTADYLCRAESRTSWSSPSPLDVWGRGTQVTVSS

SEQ ID NO: 18290 - protein, 33 aa, synthetic construct
SPEDEIQALEEENAQLEQENAALEEEIAQLEYG

SEQ ID NO: 18291 - protein, 33 aa, synthetic construct
SPEDKIAQLKEKNAALKEKNQQLKEKIQALKYG

SEQ ID NO: 18292 - protein, 33 aa, synthetic construct
SPEDEIQQLEEEIAQLEQKNAALKEKNQALKYG

SEQ ID NO: 18293 - protein, 33 aa, synthetic construct
SPEDKIAQLKQKIQALKQENQQLEEENAALEYG

SEQ ID NO: 18294 - protein, 33 aa, synthetic construct
SPEDEIQQLEEEISQLEQKNSQLKEKNQQLKYG

SEQ ID NO: 18295 - protein, 33 aa, synthetic construct
SPEDKISQLKQKIQQLKQENQQLEEENSQLEYG

SEQ ID NO: 18296 - protein, 33 aa, synthetic construct
SPEDENAALEEKIAQLKQKNAALKEEIQALEYG

SEQ ID NO: 18297 - protein, 33 aa, synthetic construct
SPEDKNAALKEEIQALEEENQALEEKIAQLKYG

SEQ ID NO: 18298 - protein, 33 aa, synthetic construct
SPEDEIQALEEKNAQLKQEIAALEEKNQALKYG

SEQ ID NO: 18299 - protein, 33 aa, synthetic construct
SPEDKIAQLKEENQQLEQKIQALKEENAALEYG

SEQ ID NO: 18300 - protein, 33 aa, synthetic construct
SPEDENQALEQKNAQLKQEIAALEQEIAQLEYG

SEQ ID NO: 18301 - protein, 33 aa, synthetic construct
SPEDKNAQLKEENAALEEKIQQLKEKIQALKYG

SEQ ID NO: 18302 - protein, 33 aa, synthetic construct
SPEDENQALEQEIAQLEQEIAALEQKNAQLKYG

SEQ ID NO: 18303 - protein, 33 aa, synthetic construct
SPEDKNAQLKEKIAALKEKIQQLKEENQALEYG

SEQ ID NO: 18304 - protein, 64 aa, synthetic construct
GSPKEEARELIRKQKELIKEQKKLIKEAKQKSDSRDAERIWKRSREINRESKKINKRIKELIKS

SEQ ID NO: 18305 - protein, 62 aa, synthetic construct
PKKEAEELAEESEELHDRSEKLHERAEQSSNSEEARKILEDIERISERIEEISDRIERLLRS

SEQ ID NO: 18306 - protein, 77 aa, synthetic construct
GTKEDILERQRKIIERAQEIHRRQQEILEELERIIRKPGSSEEAMKRMLKLLEESLRLLKELLELSEESAQLLYEQR

SEQ ID NO: 18307 - protein, 83 aa, synthetic construct
GTEKRLLEEAERAHREQKEIIKKAQELHRRLEEIVRQSGSSEEAKKEAKKILEEIRELSKRSLELLREILYLSQEQKGSLVPR

SEQ ID NO: 18308 - protein, 76 aa, synthetic construct
TKEDILERQRKIIERAQEIIRRQQEILEELERIIRKPGSSEEAMKRMLKLLEESLRLLKELLELLEESAQLLYEQR

SEQ ID NO: 18309 - protein, 78 aa, synthetic construct
GSTEKRLLEEAERAHREAKEIIKKAQELHRRLEEIVRQSGSSEEAKKEAKKILEEIRELSKRLLELLREILYLSQEQK

SEQ ID NO: 18310 - protein, 76 aa, synthetic construct
TKEDILERARKIIERAQEIHRRQQEILEELERIIRKPGSSEEAMKRMLKLLEESLRLLKELLELSEELAQLLYEQR

SEQ ID NO: 18311 - protein, 78 aa, synthetic construct
GSTEKRLLEEAERAIREQKEIIKKAQELHRRLEEIVRQSGSSEEAKKEAKKILEEIRELSKRSLELLREILYLLQEQK

SEQ ID NO: 18312 - protein, 35 aa, synthetic construct
TKEDILERQRKIIERAQEIHRRQQEILEELEYIIR

SEQ ID NO: 18313 - protein, 121 aa, synthetic construct
MSEEAMKRMLKLLEESLRLLKELLELSEESAQLLYEQRKANNGSETEKRLLEEAERAHREQKEIIKKAQELHRRLEEIVRQSGSSEEAKKEAKKILEEIRELSKRSLELLREILYLSQEQK

SEQ ID NO: 18314 - protein, 77 aa, synthetic construct
MTKEDILERQRKIIERAQEIHRRQQEILKEQEKIIRKPGSSEEAMKRSLKLIEESLRLLKELLELSEESAQLLYEQR

SEQ ID NO: 18315 - protein, 77 aa, synthetic construct
GTEKRLLEEAERAHREQKEIIKKAQELHKELTKIHQQSGSSEEAKKRALKISQEIRELSKRSLELLREILYLSQEQK

SEQ ID NO: 18316 - protein, 76 aa, synthetic construct
TKEDILERQRKIIERAQEIHRRQQEILKRSEEIIRKPGSSEEALETLRELQEESLRLLKELLELSEESAQLLYEQR

SEQ ID NO: 18317 - protein, 78 aa, synthetic construct
GSTEKRLLEEAERAHREQKEIIKKAQELHRRTEEIIRQSGSSEEAKDELRRIQEEIRELSKRSLELLREILYLSQEQK

SEQ ID NO: 18318 - protein, 36 aa, synthetic construct
TTKRYLEEAERAHREQKEIIKKAQELHRRLEEIVRQ

SEQ ID NO: 18319 - protein, 116 aa, synthetic construct
GSSEEAKKEAKKILEEIRELSKRSLELLREILYLSQQVNDVDEKALERQRKIIERAQEIHRRQQEILEELERIIRKPGSSEEAMKRMLKLLEESLRLLKELLELSEESAQLLYEAR

SEQ ID NO: 18320 - protein, 35 aa, synthetic construct
EAMKRMLKLLEESLRLLKELLELSEESAQLLYEAR

SEQ ID NO: 18321 - protein, 116 aa, synthetic construct
TTKRYLEEAERAHREQKEIIKKAQELHRRLEEIVRQSGSSEEAKKEAKKILEEIRELSKRSLELLREILYLSQQVNDVDEKALERQRKIIERAQEIHRRQQEILEELERIIRKPGS

SEQ ID NO: 18322 - protein, 77 aa, synthetic construct
TREELLRENIELAKEHIEIMREILELLQKMEELLEKARGADEDVAKTIKELLRRLKEIIERNQRIAKEHEYIARERS

SEQ ID NO: 18323 - protein, 78 aa, synthetic construct
GTERKLLERSRRLQEESKRLLDEMAEIMRRIKKLLKKARGADEKVLDELRKIIERIRELLDRSRKIHERSEEIAYKEE

SEQ ID NO: 18324 - protein, 76 aa, synthetic construct
GDRQELIRRNIELLKEHIKILEEISQLIEELSELLDKSSSEEVVKRYKKILERYKQLLRKSQEIHKESSEIAKKES

SEQ ID NO: 18325 - protein, 82 aa, synthetic construct
GDEQKLIERSQRMQKESLELLKEIIKILDTIEKLLDKPDSEELLDTIKKLHDTLKKIHDRNKKLLKEHEEILRQRSGSLVPR

SEQ ID NO: 18326 - protein, 73 aa, synthetic construct
DKEEEYKRLLDEIKEILKESKEVLKDSKRVLEDIKRKVPDDDLVKLLEKHVRLLEEHVKLLEQLIREAEKSSK

SEQ ID NO: 18327 - protein, 72 aa, synthetic construct
QGSSAEELLKKIKESEKKIRDSLRKIKEIIKKSRKEGVDDKQLDLIRKVVESHRDLLRLHRDLLRLLREETS

SEQ ID NO: 18328 - protein, 77 aa, synthetic construct
DIDESIKEVEKLLEEVEQSLQKLDDSLKKLLEKVNQDPDVDDSVRKIVKRHVEILKRHEEVLKRLIEVVKEHTKTVK

SEQ ID NO: 18329 - protein, 72 aa, synthetic construct
GSDREEVHKEIVKLIREIIKIHKKILKIHEKIKNGEIDPSEILKLSEEIKKLTDTIIKIIEDLEQLTRDLRR

SEQ ID NO: 18330 - protein, 71 aa, synthetic construct
DRKEIVKRHQKVVELLKESSKLLRESSKLLQRLLDKTGDENLQKAVDDQDKAIKRQETAIRKSQEASKKLD

SEQ ID NO: 18331 - protein, 77 aa, synthetic construct
DNSEEIKKVAKTSREVAEYSERVAKENDKVVKTLEEGKIDESELLRLLEESIKIFDTALKLHEEAYKLHQDLVRKVS

SEQ ID NO: 18332 - protein, 72 aa, synthetic construct
DESEAASVAIESVQILVESVKLLEESVRILLDAVKKNGVEDLLRVAQRWEKLVDEWLKVVKRWLDNVRDIQR

SEQ ID NO: 18333 - protein, 76 aa, synthetic construct
GSDKAEEVEKSVRKIEESIKKIRKSIKKAEDAVQLLKEGKIDAKDFLRIVREDLEVVKEDVEIVKEDVENVREFSS

SEQ ID NO: 18334 - protein, 69 aa, synthetic construct
SDKEVSDKLLKASKKLLKVSEELLEVVRRLLKALKDDELIKKIADLLRKIIDKDKKFIRTSEEIVKESR

SEQ ID NO: 18335 - protein, 78 aa, synthetic construct
GSDLKEVLKTVEEAVKEIIKSSEELLQISRKILEISRVGVDEHEYISAIREYLKALEKHIQILKKFIEILKELIRAVS

SEQ ID NO: 18336 - protein, 81 aa, synthetic construct
SKEEIDKIVKKHKKKIEEHKKKVDELKKLVEEHDKRVSQDKDDKVKKLSEEVKKIIKRLEEVSKRLEEVSKKLLKVISDKR

SEQ ID NO: 18337 - protein, 78 aa, synthetic construct
GSNDEELKKILETLDRILKKLDKILTRLIEVLKKSEDPNLDDKDYTELVKQFIELIKKYEEVVKEYEEVVRQLIRLFS

SEQ ID NO: 18338 - protein, 81 aa, synthetic construct
SKEEIDKIVKKHKKKIEELKKLVDELKKLVEEHDKRVSQDKDDKVKKLSEEVKKIIKRVEEVAKRLEEVSKKLLKVISDKR

SEQ ID NO: 18339 - protein, 78 aa, synthetic construct
GSNDEELKKILETLDRILKKLEKILTRLIEVLKKSEDPNLDDKDYTELVKQFIELIKKFEEVIKEYEEVVRQLIRLFS

SEQ ID NO: 18340 - protein, 81 aa, synthetic construct
SKEEIDKIVKKHKKKIEEHKKKVDEHKKLVEEHDKRVSQDKDDKVKKLSEELKKISKRLEEVSKRLEEVSKKLLKVISDKR

SEQ ID NO: 18341 - protein, 78 aa, synthetic construct
GSNDEELKKILETLDRILKKLDKILTRLDEVLKKSEDPNLDDKDYTELVKQYIELVKKYEEVVKEYEEVVRQLIRLFS

SEQ ID NO: 18342 - protein, 69 aa, synthetic construct
DHSRKLKEILDRLRKHVKRLKEHLDELRDLVRQVPEDKLLEHVVKLSDKILQISERAVREFTKSVDKDS

SEQ ID NO: 18343 - protein, 76 aa, synthetic construct
GSDKKDELERILDEIRRLIERLDEILSRLNKLLELLKHGVPNAKEVVKDYIRLLKEYLELVKEFLKLVKRHADLVS

SEQ ID NO: 18344 - protein, 72 aa, synthetic construct
DSDEHLKKLKTFLENLRRHLDRLDKHIKQLRDILSENPEDERVKDVIDLSERSVRIVKTVIKIFEDSVRKKE

SEQ ID NO: 18345 - protein, 75 aa, synthetic construct
GSDDKELDKLLDTLEKILQTATKIIDDANKLLEKLRRSERKDPKVVETYVELLKRHEKAVKELLEIAKTHAKKVE

SEQ ID NO: 18346 - protein, 73 aa, synthetic construct
MDEEDHLKKLKTHLEKLERHLKLLEDHAKKLEDILKERPEDSAVKESIDELRRSIELVRESIEIFRQSVEEEE

SEQ ID NO: 18347 - protein, 74 aa, synthetic construct
GDVKELTKILDTLTKILETATKVIKDATKLLEEHRKSDKPDPRLIETHKKLVEEHETLVRQHKELAEEHLKRTR

SEQ ID NO: 18348 - protein, 72 aa, synthetic construct
DSDEHLKKLKTFLENLRRHLDRLDKLLKELRDILSENPEDERVKDVIDELERVIRIVKTVIKIFEDSVRKKE

SEQ ID NO: 18349 - protein, 75 aa, synthetic construct
GSDDKELDKLLDTLEKILQTATKIIDDLNKVLEKLRRSERKDPKVIETVVELLKRHEKAVKELLEIAKTHAKKVE

SEQ ID NO: 18350 - protein, 72 aa, synthetic construct
DSDEHLKKLKTFLENLRRLEDLLDKHIKQLRDILSENPEDERVKDVIDLSERVVRTVKTVIKIFEDSVRKKE

SEQ ID NO: 18351 - protein, 75 aa, synthetic construct
GSDDKELDKLLDTLEKILQTATKVVDDANKLLEKLRRSERKDPKVVETYVELLKRLEKLIKELLEIAKTHAKKVE

SEQ ID NO: 18352 - protein, 37 aa, synthetic construct
DSDEHLKKLKTFLENLRRHLDRLDKHIKQLRDILSEN

SEQ ID NO: 18353 - protein, 114 aa, synthetic construct
EDERVKDVIDLSERSVRIVKTVIKIFEDSVRKLEKTKPDSKTAKELDKLLDTLEKILQTATKIIDDANKLLEKLRRSERKDPKVVETYVELLKRHEKAVKELLEIAKTHAKKVE

SEQ ID NO: 18354 - protein, 114 aa, synthetic construct
DSDEHLYKLKTFLENLRRHLDRLDKHIKQLRDILSENPEDERVKDAIDLSERSVRIVKTVIKIFEDSVRKKEKRPIDKRDDKELDKLLDTLEKILQTATKIIDDANKLLEYLRR

SEQ ID NO: 18355 - protein, 35 aa, synthetic construct
GDPKVVETYVELLKRHEKAVKELLEIAKTHAKKVE

SEQ ID NO: 18356 - protein, 72 aa, synthetic construct
DSDEHLDRLDKHLKKLKTFLENLRRHIKQLRDILSENPEDERVKDVIDLSKTVIKIFEDSVRKKERSVRIVE

SEQ ID NO: 18357 - protein, 75 aa, synthetic construct
GSDDKEATKIIDDLDKLLDTLEKILQTANKLLEKLRRSERKDPKVVETYVKAVKELLEIAKTHAELLKRHEKKVE

SEQ ID NO: 18358 - protein, 72 aa, synthetic construct
DSDEHIKQLRDHLDRLDKHLKKLKTFLENLRRILSENPEDERVKTVIKIFEDSVRKKERSVRIVKDVIDLSE

SEQ ID NO: 18359 - protein, 75 aa, synthetic construct
GSDDKEANKLLEKATKIIDDLDKLLDTLEKILQTLRRSERKDPKAVKELLEIAKTHAELLKRHEKVVETYVKKVE

SEQ ID NO: 18360 - protein, 104 aa, synthetic construct
DHSRKLEEILDRLRKHVKRLLEHLRELLSLVKENPEDKDLVEVLELSLAILRRSLEAVEAFLKSVTKKDPDDEDLRRKADEIRKEVEEIKKSLAEVEKEIYKLK

SEQ ID NO: 18361 - protein, 116 aa, synthetic construct
GSSADDVLEDILKIIRELIEILDQILSLLNQLLKLLRHGVPNAKKVVEKYKEILELYLQLVSLFLKIVKTHADAVSGKIDKKAEEEIKKEEEKIKEKLRQAKDILKKLQEEIDKTR

SEQ ID NO: 18362 - protein, 107 aa, synthetic construct
DRDAHLYKLLTFLEQLVRHLDRLVKHITQLRDIVKKDPEDERAVDVIRQSVRSLEIVITVLKIFVDSVSDAARSKEAEKIVRKIRKEIDEIRQKLREIDKEVKKTTS

SEQ ID NO: 18363 - protein, 114 aa, synthetic construct
GSNDKVLDKILDILDRILRLATRVIDLANKLLQVKKKSTHKDPRIVETYKELLKIHETAVRLLLELADLHRRLKSKDEEANKRVETELDRIRKKVKDIEDKVRKLEDKVRKTAS

SEQ ID NO: 18364 - protein, 68 aa, synthetic construct
NDLSKEVLKKLEKSVEELLRRVQKSVKEAQKRGLLSDELVDRHLKILNQLVKRHLELLQEVIKRSDKK

SEQ ID NO: 18365 - protein, 78 aa, synthetic construct
GSDEAVKRVVEKSLKILDEVIKKSLDILRELIELQIRHAKDDESVIRASKSALKDAIEALKKSLDEIKKALKRSADEG

SEQ ID NO: 18366 - protein, 76 aa, synthetic construct
SSEEVVKVHEKVVKLHKEILELLKKIIKIHETAARDPDDKDSIKKLSDEIKKIVKRIEDISDQAKRESSDAQRKQS

SEQ ID NO: 18367 - protein, 74 aa, synthetic construct
DKEEESKELLKKLKEILKRSEELLEESKELLKLAKNGEIDESELADADRKLNKKHEKLVQDIQDLLREHERQDR

SEQ ID NO: 18368 - protein, 73 aa, synthetic construct
DEKKKIDKIVKETEDLLQKSEKLLQQSKEAVKRIRSQVKENEIVDRLLRISEELLKISRRLVEISRRIASTLS

SEQ ID NO: 18369 - protein, 78 aa, synthetic construct
GSSKEEVIRLLKENVRLIKENLELLTRNLKLITDLVRGSNGSEEKIKTLKELLKEYRELLKRYRKLVEDYKRLVDKHD

SEQ ID NO: 18370 - protein, 81 aa, synthetic construct
EIQELIKSSRRIIEESKELIKESEEVLRRIKEILDRIRNGVDNQEDLLREILKLLTKNLKIIQRNLKLLQDNAEILKRLVS

SEQ ID NO: 18371 - protein, 75 aa, synthetic construct
GSYIEDVIKKILDVSRELIKLSRTIIKISEEINKQLQQGRDTKDLVKKYDEIIKKYTRIVQHYTELIKELQKLLS

SEQ ID NO: 18372 - protein, 75 aa, synthetic construct
SPTEEAIQLSQRVIELSKRVIELSKEILKLLKRVLDLLPDLDKNEEKRLDDYDKELKEYDKELKKYEKRLKDLAS

SEQ ID NO: 18373 - protein, 75 aa, synthetic construct
GSEEEEILKIQKELLRIQSEILDKQKKILDTLRSNGAVTEEVRSILEKVERLSEEAKELSKEAKELTKEVSKLIS

SEQ ID NO: 18374 - protein, 77 aa, synthetic construct
SPLKELNNQLLRLLRELVKVSKKIVDLSKTIIEVLKHTDLDPRLLDSLEKSQQELDKSQKELDKVVKELTKVNKKLQ

SEQ ID NO: 18375 - protein, 78 aa, synthetic construct
GSPLEDLVRKYDELVKTYEKLVEEFKKAVDKYDKAVKKAPVSKEATDSLDLIRKVLELLDRNLKLIKENAKLIKELLK

SEQ ID NO: 18376 - protein, 69 aa, synthetic construct
SPTRENEKVIKENEKVISDNERVLEEVVKVVETATDRKEIQDAVDEVRKSVDKLRDSVRKLEESVRTLD

SEQ ID NO: 18377 - protein, 72 aa, synthetic construct
GSPIKDISKRLLEISKRLVEISDRIVELLQRIADSKDPNKDLQKEVKDVLEEYKRLVREYREVVKEYEKVVS

SEQ ID NO: 18378 - protein, 75 aa, synthetic construct
DEDEHVKQLIKNADLLRKHAELLKELVKLFQEIASQIPDDRVAKKVTDVVDRIDKILKQTEKLVRRTKQILDYSR

SEQ ID NO: 18379 - protein, 71 aa, synthetic construct
GSNLEELVKLLKEVLEMHERLLRIHEDLVEAHKSNASDKESERKLKKSDKDIKESLKKIKSIIDQVRYIQS

SEQ ID NO: 18380 - protein, 70 aa, synthetic construct
PVEDIIEESLRLLEESLKLLNRILKLLEDSLRKLPRSEEWRQRLDEFRKKLEDWKEELERWIEDVRYKKT

SEQ ID NO: 18381 - protein, 78 aa, synthetic construct
GSDEDYESREIIDEIRKLLDRSKKIVHRSQRLVERVKSTPLSEDQEDLIRRHEETINRHRELVKELEKVLEDHERHIR

SEQ ID NO: 18382 - protein, 78 aa, synthetic construct
PEEDSRRVLERFVRVSREVLKVLEEFLRVSEELLREADRDRDRRLEEYERQVDELREEIRRYKEEVDKFDKEVKYYKK

SEQ ID NO: 18383 - protein, 79 aa, synthetic construct
GSPEKDENRKLLDKVRKLVEKSRRLVEELRKLVDQSTKNGLIDEKALRKQQEVLRKVEEVLEKQERVLRELEEISYRVI

SEQ ID NO: 18384 - protein, 39 aa, synthetic construct
GSPERDENRKLLDKVRKLVEKSRRLVEELRKLVDQSTKN

SEQ ID NO: 18385 - protein, 124 aa, synthetic construct
GSDEKALRKQQEVLRKVEEVLEKQERVLRELEEISYRVITRGEDHKAEEDSRRVLERFVRVSREVLKVLEEFLRVSEELLREADRDRDRRLEEYERQVDELREEIRRYKEEVDKFDKEVKYYKK

SEQ ID NO: 18386 - protein, 39 aa, synthetic construct
GSDRRLEEYERQVDELREEIRRYKEEVDKFDKEVKYYKK

SEQ ID NO: 18387 - protein, 125 aa, synthetic construct
GSPERDENRKLLDKVRKLVEKSRRLVEELRKLVDQSTKNGLIDEKALRKQQEVLRKVEEVLEKQERVLRELEEISYRVITRGEDHKAEEDSRRVLERFVRVSREVLKVLEEFLRVSEELLREADR

SEQ ID NO: 18388 - protein, 75 aa, synthetic construct
DLSEESKKFVEKVKKLEKESRELEKQVKKIEEDSRSVENDVQKEFLELLKRLLDIQKKVVEVLREVVKVQQYVDS

SEQ ID NO: 18389 - protein, 80 aa, synthetic construct
GSDSEYESRQVLRELDTVLKDSHTVLEALRQVIRDSQDVVSKSDEESRRVIDDLEKVIQDSKKVLDDIKRLIDKSKSIKS

SEQ ID NO: 18390 - protein, 75 aa, synthetic construct
NEDELLKLLTENLKLLDENLKLLRENLSLLRQANNITDKNRIREIVKQSKEIVKQSREILKQSKEIVERIKYIVS

SEQ ID NO: 18391 - protein, 78 aa, synthetic construct
GSSLYELTQRYEKLVQQYEELVKDYRRLVKKLEKLKRDNKPDKRLLKEIVDVIKKSVEIIDRSLKLLEESIKILEETD

SEQ ID NO: 18392 - protein, 73 aa, synthetic construct
SQERSLEILKRILDVLKESLEILKESLSILRQLASRIKNPNRKIEEILKESDKIIKESDKVLKEIEEVIRYSS

SEQ ID NO: 18393 - protein, 78 aa, synthetic construct
GSDIEYESKEILELIKELLKLSRELLKESRRALELVRKSRDDSIVEEVIQVHKKVLDIHKEVLKIVRKVVEVHRRVKS

SEQ ID NO: 18394 - protein, 76 aa, synthetic construct
SKKDESTKLERLAEKIDEITKRIEELVKDVKRKSSEGVDKDQQQKIDEVFQKLLDLQREILEILDRILKVQQYILD

SEQ ID NO: 18395 - protein, 78 aa, synthetic construct
GSDLEYLNRRLLQLIKTLIDLNRHLLKLIDKLKKLNSREGDEEKIKEESKQIQEQFKEIVERSKEIIKQIKEIIKRSQ

SEQ ID NO: 18396 - protein, 79 aa, synthetic construct
DFERSSRRLEKVVEDLRRSSDRLREVIDELRKSADEKDEDEDLRRARKEHRDLIEELKRALEKQEEIIKHLQELVYRQL

SEQ ID NO: 18397 - protein, 78 aa, synthetic construct
GSEESEEVRKVVERIKKISRELEEVVKELDRVSKEFDRHGETDEIVREHERIVEKLEEIVKKHTKIVEELAEIVYKQQ

SEQ ID NO: 18398 - protein, 71 aa, synthetic construct
SDDDSVRVLDEIVKILDESVKLLKESLKLLDDFLRTKPDDHLKEVVKESKKVVEQSKKVLDRIKKIIYESK

SEQ ID NO: 18399 - protein, 72 aa, synthetic construct
GSDLLYLSKELLKLVRELLKLSRELVELSRRLVNSTHKSPELVKKYDKLVKKYQDLLKKLADVADEYLRQRS

SEQ ID NO: 18400 - protein, 76 aa, synthetic construct
DEKDYHRRLIEHLEDLVRRHEELIKRQKKVVEELERRGLDERLRRVVDRFRRSSERWEEVIERFRQVVDKLRKSVE

SEQ ID NO: 18401 - protein, 78 aa, synthetic construct
GSDAYDLDRIVKEHRRLVEEQRELVEELEKLVRRQEDHRVDKKESHEILERLERIIRRSTRILTELEKLTDEFERRTR

SEQ ID NO: 18402 - protein, 77 aa, synthetic construct
DERYRAREHIRRVEEHTKRLRHILKRLREHEEKLRRELKPGDEITESVDRFKKIVDQFEESIKKFETVSEELRKSDS

SEQ ID NO: 18403 - protein, 71 aa, synthetic construct
GSDRQRILDRLDKILEKLDDILKKLKDILETLSKDDVSDRRHKDLVEKFRELVDTHHKLVERYRELVYQNR

SEQ ID NO: 18404 - protein, 38 aa, synthetic construct
GSDEITESVDRFKKIVDQFEESIKKFETVSEELRKSIS

SEQ ID NO: 18405 - protein, 107 aa, synthetic construct
GSDPQRAADRLDKILEKLDDILKKLKDILETLSKDDVKDRRAKDLVEKFRELVDTHHKLVERYRELVYTATAGSDLARELIRRVEEHTKRLRHILKRLREHEEKLRR

SEQ ID NO: 18406 - protein, 73 aa, synthetic construct
NADDQLATSIKKLEDSIDQLIKIVRKFEESVKKLQKHGVDQHHVEILRKIVEIFRQHIEKLKKHLEKLRYTSS

SEQ ID NO: 18407 - protein, 70 aa, synthetic construct
GSDKEYLVTEHEKLVREHEKIVSEIEKLVKKHEAGVDESELEEILKKVEKLLRKLDEILEQLTQLLRKTE

SEQ ID NO: 18408 - protein, 36 aa, synthetic construct
GSDQHVVEILRKIVEIFRQHIEKLKKHLEKLRYTSS

SEQ ID NO: 18409 - protein, 114 aa, synthetic construct
GSDAEYLVTEHEKLVREHEKIVSEIEKLVKKHEKGVDESELEEILKKVEKLLRKLDEILEQLTQLLRKAEKHIDKHSKAADQLATSIKKLEDSIDQLIKIVRKFEESVKKLQKH

SEQ ID NO: 18410 - protein, 74 aa, synthetic construct
DEDDDIRRVLDESRRVLEHSRRVLKRSEEVLEKASRKKEKDTEEIEKHLKRLREHAKKLEKHRRELDDFLYKEI

SEQ ID NO: 18411 - protein, 74 aa, synthetic construct
GSRDKYLLERLNDILKKLDEIVDKLSDILKRLKDVRHDDRLQELVERYKEIVKEYKRIVEEYEKLVREFEEQQR

SEQ ID NO: 18412 - protein, 73 aa, synthetic construct
DRDYEDKEFKKIIKELEDVQEELKKLQEKIKRFSSELEEPNELLKEQLKVNEEQLEVNKKILKILRDQLKQNE

SEQ ID NO: 18413 - protein, 76 aa, synthetic construct
GSDAEYKVRESVKRSKESVKHSEDVVDKLNKSVKLSESGHSDAEKASRELVKLVREVVELSREVIKLSEKVLRVIS

SEQ ID NO: 18414 - protein, 79 aa, synthetic construct
DLQYKQEKLIRHFDRVVREWDKLVRKFSKVLEKQKHESKDKELEEASRRVDELIKRLREQLKRSKEILRRLKELSRKSS

SEQ ID NO: 18415 - protein, 79 aa, synthetic construct
GSDWEELLRRLEKVLQEYEEIVKELIDLIERLIKVSEDKSKDASEYKKLVTELEKLISKLEEISKKLEELVKEYEYKTE

SEQ ID NO: 18416 - protein, 76 aa, synthetic construct
DAKDELEKSLQEIEESLKELKKLLEELDKSLRELTSQGRNKKLEEHIKKVQKFIELVKKYIKAVQDYLKEVRYDNS

SEQ ID NO: 18417 - protein, 75 aa, synthetic construct
GSDKERAARATEEMVKLTKKLLKAVEDLVRDVRRLLKEGLISEKHARIAETILEVFKKHAKIIKKHVDIVKYDES

SEQ ID NO: 18418 - protein, 78 aa, synthetic construct
GSPLKERLLEIQRDLDRVLEEVVERLLRIQERLDSVVERKPPDVHEEYKYIVDEIREIVERVVREYEEIVKRIDEEVR

SEQ ID NO: 18419 - protein, 83 aa, synthetic construct
GSEEDERIRYDLDRIRKDVRRKLEEIRQRVRELEKKLRDAGHRRDEKELLRELIETSKDILRLVEELLKKIIDKSEDLLRKTE

SEQ ID NO: 18420 - protein, 73 aa, synthetic construct
GSDEEDYINENVEKDVRDIEDDVRRINERIRELLEKIRTEEVLQRVLEEHHELVERVLRKLVEILRKHEEENR

SEQ ID NO: 18421 - protein, 77 aa, synthetic construct
GSDEEEYYKEKLHKLLREIEELLKHYRELVRRLEELVKRGELDKDTAAHILERLSELLERIIRRVAHTLRRLSEERR

SEQ ID NO: 18422 - protein, 84 aa, synthetic construct
GSDEDEISYDSKRRVEEIVRQAREKSEKSRKDIEDVAEVLRKGDVSEKEVVDELVKVLEEQVKVLREAVERLREVLKKQVDDVR

SEQ ID NO: 18423 - protein, 82 aa, synthetic construct
GSDIVELVDHLLKRSLKLLEELAELVRRLLEKSTELLKRRTEEHKEEVVEESEYMVRELEERLRRVVDESEKLVRDADKHIR

SEQ ID NO: 18424 - protein, 83 aa, synthetic construct
GSKEKDIVKTLVDLLRENLETLERLIEEVVRLLKENVDVRDEGRDDKDSERILRDIKRRIDEAAKESREIIERIEKEVEYRSR

SEQ ID NO: 18425 - protein, 80 aa, synthetic construct
GSPEVDVLRRIVREILKASEELLRLLRKLIDEALKLSERKRDSQEYREVVDRVKKELERLLDEYRKLVEELKEKLRYDTR

SEQ ID NO: 18426 - protein, 84 aa, synthetic construct
GSDKRYESEKLKRRLDEAVEKVREVVERVERESDRVLEEVRRRRESKEVVDKVIEDNDKALEDVLRVVDEVAKVVRDVVRENTR

SEQ ID NO: 18427 - protein, 77 aa, synthetic construct
GSPREYHSKDILRKVDEILERIRRHADRVKKKSERLKRENVDVNEHSKDVKRVIRELLELVKELLRLAKKHSDDQQE

SEQ ID NO: 18428 - protein, 79 aa, synthetic construct
GSDEDEILYHSERLLQKLKKELDDLKEKSRELLEELKKEDPDDRLIERIIRLHDEVLKDLDEVLKNILEVHREVLERLR

SEQ ID NO: 18429 - protein, 75 aa, synthetic construct
DKLDRLLKIHEEALRRAEELIKRLLDIHRRALDLARRGELDDYLLKESERELREIIRRAREELKESRDRLEEISR

SEQ ID NO: 18430 - protein, 80 aa, synthetic construct
GSPKEELIRRVLEEVKRLNEKLLEIIRRAAELVKRANDELPETEKLREIDRELEKKLKEIEDELRRIDKELDDALYEIED

SEQ ID NO: 18431 - protein, 80 aa, synthetic construct
GSPKLDKLRELLERNLEKLREILEEVLKILRTNLERVREDIRDEDVLQEYERLIRKAEEDLRRVLKEYDDLLKKLVYELR

SEQ ID NO: 18432 - protein, 75 aa, synthetic construct
GSKEDESVKRAEEIVRTLLKLLEDSLREAERSLRDIKNGEDEHNLRRISEKLEELSKRITETIERLLRELQYTSR

SEQ ID NO: 18433 - protein, 84 aa, synthetic construct
GSPNQELLDRVRKILEDLLRLNEELVRLNKELLKRALEMRRKNRDSEEVLERLAEEYRKRLEEYRRELEKLLEELEETIYRYKR

SEQ ID NO: 18434 - protein, 84 aa, synthetic construct
GSDESEEAQHEVEKVLDDIRRLSEHLQKRLEEVLEEVYELRREGSDRTEVVELLKEVIREIVRVNREALERLLRVVEEAVKRNE

SEQ ID NO: 18435 - protein, 83 aa, synthetic construct
GSDEEELVETVKRIQKEILDRLTELAKLLVEIQREIKKLKDEGEDDKELKRLSDELEEKVRQVVEEIKRLSDELEETVEYVSR

SEQ ID NO: 18436 - protein, 80 aa, synthetic construct
GSDEEEEVVRRAEELVKEHEELIERVIRTHEELVYKLEDQGADKKLVDVLKRVVEESERVAREIVKVSRELIRLLEEASR

SEQ ID NO: 18437 - protein, 80 aa, synthetic construct
GSSKEEILKELEDLQRRLIEELKKLQERVVELLEELIKRLRDRGRDDKHLKRLVKEVRRLSEEVLRSIKEVSDRVRYQLR

SEQ ID NO: 18438 - protein, 81 aa, synthetic construct
GSDKEEESEYLLRDLVRLLEKVKEKIEEVNREVEKLLKKVKDGRLDRREVLREILRLNRELAEIIKEVVDRIRHVVERSER

SEQ ID NO: 18439 - protein, 76 aa, synthetic construct
GSDLHEVVYETKELLKRIEEVVEELRKKSEDIIRKAERGEISEDELKRLQEEIAREAKKLLDEIKRVLERHLEQTL

SEQ ID NO: 18440 - protein, 81 aa, synthetic construct
GSPVEEIIKEVVKRVIEVQEKVLRIISHAVKRVVEVQKKYDPGSEESNRVVEEVKKTIEDAIRESDEVVDEVVKRIQYTVR

SEQ ID NO: 18441 - protein, 80 aa, synthetic construct
GSPEQEIADRILTEIRESQKELERLARKILKLLDESQEKAKRGRLSEEESDELLERIKKELDELLERSKELLKKIEYELR

SEQ ID NO: 18442 - protein, 80 aa, synthetic construct
GSDEDKEANRVLDEVLKTVRDLLETANEVLKEVLYRLKRTDDQEKVVRTLTEVLKEHLKLVEEIVRILDKVLKEHLETEK

SEQ ID NO: 18443 - protein, 76 aa, synthetic construct
GSPEDDVLRRLEEVSEKILRVAEDVARQLREVSEKITQGKVDRKEWEEDIKRLKRELEELLREWKEEIERLTYELR

SEQ ID NO: 18444 - protein, 78 aa, synthetic construct
GSRREEVVKRIRELLKRNKELIDRIRELLEENEYLDKDARDKDVLRRSVELLEELVRILEESVELAKEIIKLLREVVE

SEQ ID NO: 18445 - protein, 75 aa, synthetic construct
GSDEKEDNRRLQHKIERILEKNEDLQRKLEEILELLERGEADEEKIDRLRKAVEDYRRVVEEIKEDVKRHKYTVR

SEQ ID NO: 18446 - protein, 77 aa, synthetic construct
GSDEKEEAKKASEESVRTVERILEELLKASEESVELLRRGEDAKDVVERSKEALKRVKELLDEVVKRSDEILKYIHN

SEQ ID NO: 18447 - protein, 84 aa, synthetic construct
GSDEKKLINEVVETQKRLIKEAAKRLSEVVRHQTELIRELREKNVDDKDVEKLLKESLDLAEEIVRRIKELLDESKKLVEYVSN

SEQ ID NO: 18448 - protein, 76 aa, synthetic construct
GSPDMDEVKRVLDELIEIQEEILREIKRVLEKLIKIQEDNGSEYESREVVREIVEIARKLVERSRRVVKKITETLQ

SEQ ID NO: 18449 - protein, 80 aa, synthetic construct
GSDERYATREIVERIERIAREILKRTEEIVREVREVLSRDVDQEEVVRRLADLLRESVELVQHLVRRVEELLQESVERKK

SEQ ID NO: 18450 - protein, 79 aa, synthetic construct
GSPEREALREVLEDLKRVTDRLRELVERVLEELKKVTDHVDSERILRESRRVLKELKDIIEEILRESEKVLEKLKYTED

SEQ ID NO: 18451 - protein, 80 aa, synthetic construct
GSPAREILEEVVKKHLEVVEDAARILEEIIREHEKAVREDRDKKELEEISRDLLRKAREALKKVKDISDDLSREIEYVAS

SEQ ID NO: 18452 - protein, 75 aa, synthetic construct
GSPVEEAIKKVIDDLRDVQRKIRELVEELIRLLEEVQRDNDKRESEYVVERVEEILRRITETSREVVRKAVEDLS

SEQ ID NO: 18453 - protein, 81 aa, synthetic construct
GSDSDEKAEYLLKEMERVVRESDEVVKKILRDLEEVLERLRRGEISEDDVTEILKELAERHIRAIEELVRRLRELLERHKR

SEQ ID NO: 18454 - protein, 79 aa, synthetic construct
GSPVEEVLKELSEVNERVRDIAREIIERLSEVNEEVKETDDEDELKKISKKVVDEVEDLLRKILEVSEEVVRRVEYHDR

SEQ ID NO: 18455 - protein, 76 aa, synthetic construct
GSPKEDILREVLRRHKEIVREIVRLVREAVETHLELVKRNSDDRDAQDVIRKLEEDLERLVRHAQEVIEEIFYRLH

SEQ ID NO: 18456 - protein, 75 aa, synthetic construct
GSPRSYLLKELADLSQHLVRLLERLVRESERVVEVLERGEVDEEELKRLEDLHRELEKAVREVRETHREIRERSR

SEQ ID NO: 18457 - protein, 76 aa, synthetic construct
GSDREYIIKDILDSQEHLLRLIEELLETQKELLEILKRRPDSVERVRELVRRSKEIADEIRRQSDRNVRLLEEVSK

SEQ ID NO: 18458 - protein, 75 aa, synthetic construct
GSDEKDEIRHVIESVERLIEDIKRLLKTLRELAHDDSDKKTVKEVLDRVKEMIERHRRELEEHRKELERAEYEVR

SEQ ID NO: 18459 - protein, 76 aa, synthetic construct
GSESEDRIKELLKRHIELVERHEELLHEIKKLIDLEEKDDKDREEAVKRIDDAIKESEEMLEESKEILEEIEYLNR

SEQ ID NO: 18460 - protein, 77 aa, synthetic construct
GSSLEDSVRLNDEVVKVVERVVRLNQEVVRLIKHATDVEDEETVKYVLERVREVLDESREVLKRVHELLEESERRLE

SEQ ID NO: 18461 - protein, 82 aa, synthetic construct
GSHEKDIVYKVEDLVRKSDRIAERAREIVKRSRDIMREIRKDKDNKKLSDDLLKVTRDLQRVVDELEELSRELLRVAEESRK

SEQ ID NO: 18462 - protein, 76 aa, synthetic construct
GSPELDEVKKLIDELKKSVERLEESIREVKESIKKLRKGDIDAEENIKLLKENIKIVRENIKIIKEIIDVVQYVLR

SEQ ID NO: 18463 - protein, 82 aa, synthetic construct
GSDEEEIEELLRELEKLLKKSEEALEESKKLIDESEELLRRDRLDKEKHVRASEEHVKLSEEHLRISREIVKILEKAVYSTR

SEQ ID NO: 18464 - protein, 79 aa, synthetic construct
GSDESDRIRKIVEESDEIVKESRKLAERARELIKESEDKRVSEERNERLLEELLRILDENAELLKRNLELLKEVLYRTR

SEQ ID NO: 18465 - protein, 79 aa, synthetic construct
GSDEDDELERLLREYHRVLREYEKLLEELRRLYEEYKRGEVSEEESDRILREIKEILDKSERLWDLSEEVWRTLLYQAE

SEQ ID NO: 18466 - protein, 78 aa, synthetic construct
GSDKKDASRRAIRVLHEFVRVSEEVLEVLRKSVESLKRLDVDEKIKRTHDRIEEELRRWKRELEELIERLREWEYHQD

SEQ ID NO: 18467 - protein, 75 aa, synthetic construct
GSDDEEEDKRLLEEVKRSLDTDERILEKLRHSLERQLEDVDKDEDSRRVLRELDEITKRSREVVKRLRKLAYESK

SEQ ID NO: 18468 - protein, 79 aa, synthetic construct
GSDKEYKLDRILRRLDELIKQLSRILEEIERLVDELEREPLDDKEVQDVIERIVELIDEHLELLKEYIKLLEEYIKTTK

SEQ ID NO: 18469 - protein, 79 aa, synthetic construct
GSPSKEYQEKSAERQKELLHEYEKLVRHLRELVEKLQRRELDKEEVLRRLVEILERLKDLHKKIEDAHRKNEEAHKENK

SEQ ID NO: 18470 - protein, 78 aa, synthetic construct
GSRDRKISEELIKALEDHIRMLEELIRAIEEHIKLAERGVDEKELRESLEELKKIVDELEKSLEELRKLAERYKYETR

SEQ ID NO: 18471 - protein, 77 aa, synthetic construct
GSPKEESVEELKRVIDKHEEILRELKRVLEEHERVSHDEDENELRRSLERLKHILDRLHESLKELHELLKKNEYTER

SEQ ID NO: 18472 - protein, 77 aa, synthetic construct
GSDHEYWVKIVERILRVMEKHAEIVKKHLEIVERVVREGPSEDLRRKLKESLREIEESLRELKELLDELDELSEKTR

SEQ ID NO: 18473 - protein, 72 aa, synthetic construct
GSDEEYVTRSQRRLKRLLEEYIKVVEEHARLVERNERDDKELKRSIDELDKLTKELLELVKRYKELVDKTET

SEQ ID NO: 18474 - protein, 76 aa, synthetic construct
GSDKEEIVKLQDEVIKTLERHLDILRKHIDLLEKLKDHLSEELKERVDRSIKKLEESIKRLERIIEELQELAEYSL

SEQ ID NO: 18475 - protein, 75 aa, synthetic construct
GSREEELKESAEELERSVRELKKEADKYKEEVDRLHYRGKVDKDWVRVVEKLIKLVEEHLELIREHLELLKEERR

SEQ ID NO: 18476 - protein, 75 aa, synthetic construct
GSDMEYELKKSAEELRKSLEELKRILDELHKSLRELRRHGDDEEYVQTVEELRKELEEHAKKLEEHLKELERVAT

SEQ ID NO: 18477 - protein, 70 aa, synthetic construct
PEYELKKSVDDLKRDVDRLVEEVEEVFELSKERLREDRKHLELVEEMVRLIEKHLELIKEHLKLADDHVR

SEQ ID NO: 18478 - protein, 78 aa, synthetic construct
GSREKDESKELNDEYKKLLEEYERLLRRSEELVKRAKGPRDEKELKRILEENEDILRRTKEILERTKEISEEQKYRRR

SEQ ID NO: 18479 - protein, 78 aa, synthetic construct
GSDKDERQERLNEESDKSNEESERSNRESEELNRRARGPNDEKELQEILDRHLELLERNQRLLDENKEILRESQYLND

SEQ ID NO: 18480 - protein, 76 aa, synthetic construct
GSENKYILKEILKLLRENLKLLHDILRLLDENLEELEKHGAKDLDDYRRKIEEIRKKVEDYREKIEEIEKKVERDR

SEQ ID NO: 18481 - protein, 75 aa, synthetic construct
GSESEYTQEEILELLKESIKLLREILRLLEESEELWRRENTKSERSEEIKERAKEAIKRSEEILERVKRLSDHSR

SEQ ID NO: 18482 - protein, 74 aa, synthetic construct
GSDEEEANYVSDKAVKIAEDVQELLKELLELSEVVRRGEVDEDEYDRVLRKLQEVMKEYEEVLKEYEEVSRKHE

SEQ ID NO: 18483 - protein, 80 aa, synthetic construct
GSPEKYLIKTQEELLRRHAEILEDLIRKVERQVDLRRKVDERDEDLKRELERSLRELERLVRESSRLVEEIRELSKEIKR

SEQ ID NO: 18484 - protein, 78 aa, synthetic construct
GSDEEYELERISRESKELLERYKRLLREYQELLKELRHVKDLDRAVKIIHELMRVSKELVEISHRLLELHERLVRRRK

SEQ ID NO: 18485 - protein, 79 aa, synthetic construct
GSEKEYIEKLSRKIEEDIRRSEERAKDSERLVRRLEELAKRKRLDLDDVLRVAEENLEILEDNLRILEEILKEQDKSNR

SEQ ID NO: 18486 - protein, 75 aa, synthetic construct
GSPHEEVVELHERVMEISERAVELIQRIIDIIRRIREDDKDIEKLVKTIRDLVREYEELHRELEEIDEEIYKKSE

SEQ ID NO: 18487 - protein, 82 aa, synthetic construct
GSDHEDVVRLHEDLVRKQEDARRVLEEIVRLAEEIVEVIKKDEKDKDRVTRLVEEIEKLVEEYKKKVDEMRKISDEIKYRSR

SEQ ID NO: 18488 - protein, 79 aa, synthetic construct
GSRAREVVKRAKRIIEEWQKILEEWRRILEEWRRLLEDERVDDRDNERIIRENERVIRENEKIIRDVIRLLEELLYERR

SEQ ID NO: 18489 - protein, 79 aa, synthetic construct
GSREDEELEEEIDRIRQMVEEYEELVKEYEELTEKYKQGKVDKEESKKIIEKSERLLDLSQDAVRKVKEIIRRILYTNR

SEQ ID NO: 18490 - protein, 77 aa, synthetic construct
GSPKEEIVKLHDESAELHRRSVEVADEILKMHERSKDVDDERESRELSKEIERLIREVEEVSKRIKRLSEEVEYLVR

SEQ ID NO: 18491 - protein, 77 aa, synthetic construct
GSPLEEILKIQRRINKIQDDINKILHEILRMQEKLNRSSDKDEVEESLRRIRELIKRIKDLSKEIEDLSREVKYRTT

SEQ ID NO: 18492 - protein, 81 aa, synthetic construct
GSPEDEHVYVVREIYEVLREHAEVLEENREVIERLLEAKKRGDKSEELVKELKKSIDKLKEISRKLEEIVKELEKVSEKLK

SEQ ID NO: 18493 - protein, 79 aa, synthetic construct
GSDEDETSYRILELLREIVRASRELIRLSEELLEVARRDDKDETVLETLIREYKELLDRYRRLIEELTRLVEEYEERSR

SEQ ID NO: 18494 - protein, 74 aa, synthetic construct
GSTQEEINRIQHEVLRIQEEIDEILRDIVEKLKAISRGELDHEVVKDVEDKVREALEKSEELLDKSRKVEYKSE

SEQ ID NO: 18495 - protein, 82 aa, synthetic construct
GSDEEELNRELLEKSKRLVDINRDIIRTAQELIEMLKDSKDGRVDEDTKRELRDKLRKLEEKLERVREELRKYEELLRYVQR

SEQ ID NO: 18496 - protein, 77 aa, synthetic construct
GSDEKDRVYEILKEVQRLVKEYRDISKEIEDLVKHYEHITDDEAQEVSKELIDKSLRASEIVRELIRLIKELLDELE

SEQ ID NO: 18497 - protein, 79 aa, synthetic construct
GSDEEDVLYHLRELLEELKRVSDDYERLVREIKETSERKDRDTKENKDMLDELVKAHREQEKLLERLVRLLEELFERKR

SEQ ID NO: 18498 - protein, 54 aa, synthetic construct
PREQAIRISEEIIRISKKIIEILERTRSSTAREAMKWAKDSIRLAEESKYLLDK

SEQ ID NO: 18499 - protein, 54 aa, synthetic construct
IEDDVKKIQDSTKKAQKETIEALERSTSSTARKQMEEQKEQIRLQKEAMYLLKK

SEQ ID NO: 18500 - protein, 76 aa, synthetic construct
SREEIAKLQEEVIKLQRRVIELQKEVIELQRRAKELTSSYTKEILEIQRRIEEIQREIEEIQKRIEEIQEEIQRRT

SEQ ID NO: 18501 - protein, 76 aa, synthetic construct
SDEEIKRLSEEVIQLSRRVIKMSREAIKLSREVQKLTPSYQKRIKEIADRSIELARESIEIAKRSEKIAEESQRRT

SEQ ID NO: 18502 - protein, 56 aa, synthetic construct
PAKDEALKMANESLELAKKSARLIQESSSKEILERIEKIQRRIAELQDRIAYLIKK

SEQ ID NO: 18503 - protein, 56 aa, synthetic construct
PAKDEALRMIDESRELIKKSNELIQRSSSKEILERILEIQRKIAELQKRIQYLLKS

SEQ ID NO: 18504 - protein, 75 aa, synthetic construct
TDEARYRSERIVKEAKRLLDEARRRSEKIVREAKQRSNSEDAKRIMEENLRESEEAARRLREIIRRNLEESRETG

SEQ ID NO: 18505 - protein, 75 aa, synthetic construct
TREALEYQRKMAEEIEDLLREALRRQEEMVREAKQRSLSEEFKRIMERILEEQERVMRLAKEALERILEEQKRTG

SEQ ID NO: 18506 - protein, 76 aa, synthetic construct
SERTKREAKRSQEEILREAKEAMRRAKESQDHRQNRDGSNSEDLERLSQEQKRELEEVERRLKELAREQKYKLEDS

SEQ ID NO: 18507 - protein, 76 aa, synthetic construct
SEDLKRILKEITERELKLMQDLMEILKKITEDENNLDSNNSEDLKRSIEKARRILDEALRKLEESARRAKYIQEDN

SEQ ID NO: 18508 - protein, 76 aa, synthetic construct
TEDEIRESLKWLDEVLQELREIARESNEVLERNRQKSRSDKLREDIERYKKRMEEARKKLDDQLNKYKKRMDENRS

SEQ ID NO: 18509 - protein, 76 aa, synthetic construct
TEEELKESKKFAEDLARSARRALKESKRVLEEISQASRSKKLEEIVRRYKEQVKRWQDEWDERAREYRKRMKENRS

SEQ ID NO: 18510 - protein, 76 aa, synthetic construct
TKTEEIERLAREIKKLSEKVERLAQEIEELSRRVKEENSTDRELKEANREIERAIREIEKANKRMEEALRRMKYNG

SEQ ID NO: 18511 - protein, 76 aa, synthetic construct
TKTEEHERLAREISKLADEHRKLAKIIEELARRIKEENLTDDELREAIRKIEDALRKNKEALKIMKEAAERNRYNT

SEQ ID NO: 18512 - protein, 76 aa, synthetic construct
TKKEESRELARESEELARESEKLARKSLELARRAESSGSEEEKRRIIDENRKIIERNREIIERNKEIIEYNKELIS

SEQ ID NO: 18513 - protein, 76 aa, synthetic construct
TKDEESLELNRESEELNRKSEELNRKSKELNDRAESSNSEEEEKEILREHKEILREHLEILRRHKEILRRHKYLTS

SEQ ID NO: 18514 - protein, 75 aa, synthetic construct
TREELLRENIELAKEHIEIMREILELLQKMEELLERQSSEDILEELRKIIERIRELLDRSRKIHERSEEIAYKEE

SEQ ID NO: 18515 - protein, 79 aa, synthetic construct
SEDIAREIKELLRRLKEIIERNQRIAKEHEYIARERKKLDPSNEKERKLLERSRRLQEESKRLLDEMAEIMRRIKKLLD

SEQ ID NO: 18516 - protein, 75 aa, synthetic construct
DRQKLIEENIKLLDKHIKILEEILRLLKKDIDLLKKSSSEEVLEELKKIHRRIDKLLDESKKIHKRSSEIVKKRS

SEQ ID NO: 18517 - protein, 75 aa, synthetic construct
DEQKLIETSQRLQEKSERLLEKFEQILREASDLYRKPDSEELLRRVEKLLRELEKLIRENQDLARKHEKILRDQS

SEQ ID NO: 18518 - protein, 75 aa, synthetic construct
DRQELIRENIELLKKHIKIVKEIQKLIETFIELLKKSSSEEILRRLKKILKRIEKLYRESQEIHKRSEEIAKKRQ

SEQ ID NO: 18519 - protein, 75 aa, synthetic construct
DEERLIDKSRELQKESEELLKELLKIFKRIEELLEKPDSEELIREIKKLLETLSEIHKRNEKLARTHEEILRQQS

SEQ ID NO: 18520 - protein, 74 aa, synthetic construct
STRDVQREIAKAFKKMADVQKKLAEEIKRHVKNVEKKNKDNDEYRKIATELLKKATESQKKLKELLDRIRKSDS

SEQ ID NO: 18521 - protein, 74 aa, synthetic construct
DKDDRSTSLLKRVEKLIDESDRIIDKFTTLIELSRNGKIDDDQYKKELKEILELLKKYDKHVKEVEELLKRLNS

SEQ ID NO: 18522 - protein, 70 aa, synthetic construct
SKRKALEVSERVVRISEKVVRVLDESSDLLKKSYDDSDKFAELIDRHEEKIKKWKKLIKEWLEIIQRHKS

SEQ ID NO: 18523 - protein, 68 aa, synthetic construct
SAEEFVKLSEEAVKRSKEILDIVRKQVKLVKAGVDKHEITDSLRKSEKLIEEHKELIKTHRDLLRREN

SEQ ID NO: 18524 - protein, 74 aa, synthetic construct
SSTEILKRFKRALRESEKIVKHSRRVLKIIREVLKQKPTQAVHDLVRIIETQVKALEEQLKVLKRIVEALERQS

SEQ ID NO: 18525 - protein, 73 aa, synthetic construct
DKQKEIKDILEKTRRIAEESRKIAEKFDEIIKRSTEGKIDESLTKELEELVKEVIKLSEDDARTSDDLVRKES

SEQ ID NO: 18526 - protein, 74 aa, synthetic construct
DEDESIKLTRKSIEETRKSLKIIKEVVELIREVLKHIKDLDKEIFERIDKILDKYKKQVDTYDEILKEYEKKQR

SEQ ID NO: 18527 - protein, 70 aa, synthetic construct
SELDEQKELIKKQEKLIEEQQRLLSKIRRMFKERVKDQELLREIQKVLKRSQEIVETSKKILDRSDKTTE

SEQ ID NO: 18528 - protein, 76 aa, synthetic construct
DQKEINTRIVEKLERIFKKSKEIVRQSERVISTIEKKTEDERELDLLRRHVKIVREHLKLLEELLKIIKEVQKESE

SEQ ID NO: 18529 - protein, 71 aa, synthetic construct
DTEELVKRLNELLKELSKLVKEFIKILETYRKDQTKDTSKISERVDRILKTYEDLLQKYKEILEKIEKQLS

SEQ ID NO: 18530 - protein, 68 aa, synthetic construct
DYARLIDQAVEVTRKVVEVNVTVARVNDKFAKHLGDEELRRVSEHLKEVSKDLQEVAKKSKDAARQVK

SEQ ID NO: 18531 - protein, 77 aa, synthetic construct
DVSKVAEEYLQISKTLVDISRTLLEISERLVRLVRTVADDRSEVKKAIEDSIEVLKTSEEVVRQIKRASDKLVKAIS

SEQ ID NO: 18532 - protein, 76 aa, synthetic construct
DAKEIQRRVVEIQTEVVKLQKKAVDIIRKIIEAFNNSNIDQSLLEAAKEIVKEIDKLEKLTESLLEESKKLLKRSS

SEQ ID NO: 18533 - protein, 76 aa, synthetic construct
SAEEVVKLAKIFLELLRESIKLLKRSVDLLRKSSDPSLDKSEAEKVSREIEKVSDTSLKLSKKALDVVKRALKVAS

SEQ ID NO: 18534 - protein, 81 aa, synthetic construct
DEKDAARKARKVSEEAKEASKKIEKALEESKRILNTLKQKKDEQEVKVIKEHEDVLRQIEKIQKQVLEIQKEVAKLLESLD

SEQ ID NO: 18535 - protein, 71 aa, synthetic construct
SADDVARASEKVLRVARESAKAADKSLEVFKEVVKRGDKEAFLQVVKINEEVVKINITVIRILIEVSKTAT

SEQ ID NO: 18536 - protein, 112 aa, synthetic construct
DEYVKETLKQLREALASLREADKRITELVKEARKKPLSEAARKFAEAIVTHVKVVVEHVEVVLRHVEVLVEAKKNGVIDKSILDNALRIIENVIRLLSNVIRVVDEVLQDLD

SEQ ID NO: 18537 - protein, 113 aa, synthetic construct
DASDVIRRIHELFEEVHRLIEAVHRAIEDVAKAAQKKGLDESAVEILAELSKELAKLSRRLAEISREIQKVVTDPDDKEAVERLKEIIKEIKKQLDELRDRLRKLQDLLYKLK

SEQ ID NO: 18538 - protein, 77 aa, synthetic construct
SEDKAHHDIVRVLEELIKIHDELMKISEEILKATSDSTATDETKEELKRRSKEAQKKSDTLVKIVKELEKESRKAQS

SEQ ID NO: 18539 - protein, 73 aa, synthetic construct
DDEEKYRQIIREAQEISKTAKRILRDAQEISKRIRHQGVDRSEHQRLVDLLRELIKEHHKLLRRQQEADTRND

SEQ ID NO: 18540 - protein, 74 aa, synthetic construct
DRKDKARKASEKLEEVIQRWKTVADKWKKMVDLVSNGKLSQEEVARVTEELLKIQTELAKLLEEHAKVLQESAS

SEQ ID NO: 18541 - protein, 77 aa, synthetic construct
SDEESIKTQSELIKTSEELLKDVKRIDEELQKLRDDPTLDESELKKRVKEWSDRVRKAKEISRKIQEIVKESKKRSS

SEQ ID NO: 18542 - protein, 72 aa, synthetic construct
DKDEELRKVIEKYREMVKEYRKVIREYEEVIKSSKTIDKSSLISLSRKMVELSQRVIDVSDEVAKVLSRKQS

SEQ ID NO: 18543 - protein, 69 aa, synthetic construct
TDEERLKKQTKELKEQTKQLEKQKDLLEKISNGEISKDEIQEIIKESKKIAKESQKALDSSRKALEEVS

SEQ ID NO: 18544 - protein, 75 aa, synthetic construct
DEKEVSKEIIKVLKDIAKVQQKVIEVSQRLASVLRADDDNVVKRALEEYEKILEELRELNKEIEKLTDKYRKVTS

SEQ ID NO: 18545 - protein, 77 aa, synthetic construct
DSDEQTKELEKLTELHKRHVEKLKKQTKESREVDSNKLWKSKDVKDKLSESEKELQKLSDQDKKAKDALESSRRKND

SEQ ID NO: 18546 - protein, 76 aa, synthetic construct
DAEEQLKLLTKLLRHQQRLLQLIKESLKLIEKIDQSSQENQDEIRKWREVTKKLRELIKTSEKLVRELEKSYKKSS

SEQ ID NO: 18547 - protein, 70 aa, synthetic construct
SLRDVVRRYQELVRRYDELIKTLTEILKKYQKKGAEDKDASTELVKAVRTSLKLSKELLKLNSELLKEDS

SEQ ID NO: 18548 - protein, 69 aa, synthetic construct
SKEELKRKLDELKKRSDTLKELSKKLKEISERNPDDKSVHRTIIRIHREFVKNHKEIVRVIEEIVSDKS

SEQ ID NO: 18549 - protein, 71 aa, synthetic construct
SKQDEHDRLLKIHDKLVKQHDELLKLLTKLSRAGDSVTKKKLEEILRKLQEVSKQLEESLKDADKVSKDIN

SEQ ID NO: 18550 - protein, 69 aa, synthetic construct
TVQSLLEQHVKIVKRSIEILERHTQILQDIARSQGVSKELEDVERQVKEYRKEVKKLEEDLRQLSRNSK

SEQ ID NO: 18551 - protein, 76 aa, synthetic construct
SDSDRIEKLIRESTELLKEQQKLAKRSRELAETVESLPLTEEYLKQQREHQKKIEKLLKDSEKHLEELKRLVKSEK

SEQ ID NO: 18552 - protein, 70 aa, synthetic construct
DSEKRIEDILRTDLELAKRDAELVKEHIKLVKRIDLSEELKKQVEDVEKESKKLEDSSEKLVQKVRKRSS

SEQ ID NO: 18553 - protein, 80 aa, synthetic construct
DEEERAKDLRKYLEEQTQYYRTVTEHLRNLEKVVEELERRGKPSSELQQILERSQRIYKETTEIYDTSKKLIEELDKHHR

SEQ ID NO: 18554 - protein, 77 aa, synthetic construct
PLEDILKRHLDKVRELVRLSEEVNKLAKEVLDILKDKRVDEKELDKVLKELEKVVEEYERAVKESRDLLRELRETTR

SEQ ID NO: 18555 - protein, 75 aa, synthetic construct
DKERLLEIHERIQKLLDRNLEIIERLLRLLREARDIKDDDKLDKVIKRLKELSEESKDILDKIKELLKESEKELT

SEQ ID NO: 18556 - protein, 75 aa, synthetic construct
PEDEVIRVIEELLRIAAEVDEVHRRNVEVQEEASRVTDRERLERLNRESEELIKRSRELIEEQRKLIERLERLAT

SEQ ID NO: 18557 - protein, 74 aa, synthetic construct
DLEELIKEYAEVVRRHHKAVRDLERLVRELANAKHASEEELKRIATEILRIVKELIRVQERLIKLSEDSNEESR

SEQ ID NO: 18558 - protein, 75 aa, synthetic construct
PTDEVIEVLKELLRIHRENLRVNEEIVEVNERASRVTDREELERLLRRSNELIKRSRELNEESKKLIEKLERLAT

SEQ ID NO: 18559 - protein, 74 aa, synthetic construct
DNEEIIKEARRVVEEYKKAVDRLEELVRRAENAKHASEKELKDIVREILRISKELNKVSERLIELWERSQERAR

SEQ ID NO: 18560 - protein, 72 aa, synthetic construct
PKEDIDRVSRELVRVHKELLEVLRKSTEIVEAVARNEKDERTIEEVLEEQERAVRKLEEVSKKHKEAVKRLK

SEQ ID NO: 18561 - protein, 77 aa, synthetic construct
ELERLSEEIQKLSDRLIELIRRHSKVLEEIVRLLKHKDNDEREVRRLLKLLRDLTRRYEEVLRKVEEIVKRQEDESR

SEQ ID NO: 18562 - protein, 72 aa, synthetic construct
PEEDILRLLRKLVEVDKELLEVVRESTEVVRLVARNEKDVETVERVLRKQEEVVRKYERVSRELEEAVRRLK

SEQ ID NO: 18563 - protein, 77 aa, synthetic construct
ELKDLVEEIVKLSKENLKLWEDHSRVLEEIVRLLKHKDNDEREVRRLLKLLEDLTRRAEETSRRIEEIVKEAEDRAR

SEQ ID NO: 18564 - protein, 74 aa, synthetic construct
DEERELREVLRKHHRVVREWTKVVEELKRVVELLKRGETSEEDLLRVLKKLLEMDKRILEVNREVLRVLEKRLT

SEQ ID NO: 18565 - protein, 70 aa, synthetic construct
SLEEIIEELVELVRRSVEIAKESDEVARRIVESEDKKKELIDTLRDLHREWQEVTKRAEELVREAEKEVR

SEQ ID NO: 18566 - protein, 72 aa, synthetic construct
TAEELLEVHKKSDRVTKEHLRVSEEILKVVEVLTRGEVSSEVLKRVLRKLEELTDKLRRVTEEQRRVVEKLN

SEQ ID NO: 18567 - protein, 76 aa, synthetic construct
DLEDLLRRLRRLVDEQRRLVEELERVSRRLEKAVRDNEDERELARLSREHSDIQDKHDKLAREILEVLKRLLERTE

SEQ ID NO: 18568 - protein, 72 aa, synthetic construct
PEDDVVRIIKEDLESNREVLREQKEIHRILELVTRGEVSEEAIDRVLKRQEDLLKKQKESTDKARKVVEERR

SEQ ID NO: 18569 - protein, 70 aa, synthetic construct
DEVRLITEWLKLSEESTRLLKELVELTRLLRNNVPNVEEILREHERISRELERLSRRLKDLADKLERTRR

SEQ ID NO: 18570 - protein, 70 aa, synthetic construct
DEDEVVKVHEEHVKSHEEIHRSHEEVVRAAEEDKRDSRELRTLMEEHRKLLEENEKSIEEVKKIHERVKR

SEQ ID NO: 18571 - protein, 80 aa, synthetic construct
KKEELIDISKEVLDLDDEINKISKEILELIKKLLRLKEEGREDKDKAREVKRRIRELHRRIQELNKRLRELHKRVQETKR

SEQ ID NO: 18572 - protein, 77 aa, synthetic construct
PEEDIARRVEDLLRKSEELIKESEKILKESKRLLDRNDSDKRVLETNLRLIDKHTKLLERNLELLEELLKLAEDVAK

SEQ ID NO: 18573 - protein, 74 aa, synthetic construct
RFKDLSREYIEVVKRLLELSREALEVLREIKDTDKTDKKRIKELIDRLRKLIEEYKRIIDRLRKLSKDLEEEHR

SEQ ID NO: 18574 - protein, 73 aa, synthetic construct
DEEELVKILKELQRLSEESLEINKRLVEILRLLRRGEVPKEEVEKKLREIKKEQEKLDREHEKIKKRIEEITK

SEQ ID NO: 18575 - protein, 74 aa, synthetic construct
SLKEKILEIIERNMKLVELSNRSVEIVARILKGEKDDEETLERLLREWDKITRDYEEIIKESRKLVKELEEEAK

SEQ ID NO: 18576 - protein, 74 aa, synthetic construct
SKTEILRKALEIHKEQIDIVRKLIELSEEVLKLVEESKEKNLEKLKRIDEETDRLLERLDELHKRLTELAERLK

SEQ ID NO: 18577 - protein, 80 aa, synthetic construct
SDDEARKQLEEMKRRLREVEKKSKRVEERVRELERLVRENREDEDRVLKTLEDLLRENEKLVRTIERHVREQRELSKEVK

SEQ ID NO: 18578 - protein, 73 aa, synthetic construct
SEEELEKKADELRKLSEEWRKLQEEDKRLSEMVEKGELDLQEVDEHSLRVLERATEVHRTVDKVIEEILRTTN

SEQ ID NO: 18579 - protein, 77 aa, synthetic construct
SEKERHRESQETQEEIRRTHEEIIRKLEEILRRAKAGELPEETLDRLRRIMERLKELSERLDDLVRKLRDDHRREQK

SEQ ID NO: 18580 - protein, 76 aa, synthetic construct
SEKEILEELKRILKRVKDISDRLEELDKRTEEIARREPTKELVDELVKIHRDWLRLHEEILKLVDDALKKVEDATK

SEQ ID NO: 18581 - protein, 73 aa, synthetic construct
DLRELLELQREASRLHRELVKLLTELVKKLELIAKGEDIREEDLKRIKERLEEIKKRSKRIKEESDEIDKKTK

SEQ ID NO: 18582 - protein, 72 aa, synthetic construct
SERELQRELNKIVRRILEIHREVSELHQRAVKLIRENDNSEELEEISRRIEELSKELEKLVREHDEIVKTIE

SEQ ID NO: 18583 - protein, 77 aa, synthetic construct
SEREKLDRNDEELKEINKRVEEIKERSDRITEAIEKNERSEEEIRRLSREQNEALQRLLELHKKLVKLHRELLEDTR

SEQ ID NO: 18584 - protein, 76 aa, synthetic construct
DKEDVIRVHDEQHKLIEEQLELTRRIAELVREIAKNTASEEEIKEMLKEIKRLDDRSREIQDRLQKLLEEIRRKTK

SEQ ID NO: 18585 - protein, 73 aa, synthetic construct
TEEEIVELNKDIQRKSKEHIDLQNELVKKIERAIRENNITEELLEELERLLRESEKIVEEIRRITDKIRKDAK

SEQ ID NO: 18586 - protein, 72 aa, synthetic construct
SEKEILERLLRLSKEQNEISEEIHRLTERLVELKRRKDDDERLKRILDRQKRLVERAREISKEYEDLLRKLE

SEQ ID NO: 18587 - protein, 69 aa, synthetic construct
SMEELLRKNARLSRKQLKIIDEHLELSTKLTRGEAGDETLEEIERRSREMLEEQRRVDEESKRIREKLK

SEQ ID NO: 18588 - protein, 76 aa, synthetic construct
SEEEIRDIVEKLLRTHEEVLKEIKKLLDDSERVRRRELDKKDLDRIQKEQRDIQEENKEKAKRFDELVKELKKAAK

SEQ ID NO: 18589 - protein, 70 aa, synthetic construct
SEEEHRRTMEKVEKEVRDIKRRSEEVKKKVKANTLSEEDLVRLLERLVEDHKRLQDLSQEIIERDEKATK

SEQ ID NO: 18590 - protein, 72 aa, synthetic construct
DEDELAKEIEDVQRRNKESQEEHDKSVKKLEAAERGEIDEDSLLRVLEEDIKVLEKDIEVLERSIEVIEKAE

SEQ ID NO: 18591 - protein, 73 aa, synthetic construct
SEKELIRRLLEQQRQHLRLSERLIELSRRLVEVVRKGKDNRDLLRELKKLSEEHKKHSKDDHEKVREIREREK

SEQ ID NO: 18592 - protein, 47 aa, synthetic construct
NLVAQLENEVASLENENETLKKKNLHKKDLIAYLEKEIANLRKKIEE

SEQ ID NO: 18593 - protein, 50 aa, synthetic construct
ARNAYLRKKIARLKKDNLQLERDEQNLEKIIANLRDEIARLENEVASHEQ

SEQ ID NO: 18594 - protein, 42 aa, synthetic construct
NEVTTLENDAAFIENENAYLEKEIARLRKEKAALRNRLAHKK

SEQ ID NO: 18595 - protein, 54 aa, synthetic construct
QKVAELKNRVAVKLNRNEQLKNKVEELKNRNAYLKNELATLENEVARLENDVAE

SEQ ID NO: 18596 - protein, 44 aa, synthetic construct
NTVKELKNYIQELEERNAELKNLKEHLKFAKAELEFELAAHKFE

SEQ ID NO: 18597 - protein, 54 aa, synthetic construct
QKVAQLKNRVAYKLKENAKLENIVARLENDNANLEKDIANLEKDIANLERDVAR

SEQ ID NO: 18598 - protein, 51 aa, synthetic construct
KEIEYLEKEIERLKDLREHLKQDNAAHRQELNALRLEEAKLEFILAHLLST

SEQ ID NO: 18599 - protein, 51 aa, synthetic construct
KEIANLEKEIASLEKKVAVLKQRNAAHKQEVAALRKEIAYVEDEIQYVEDE

SEQ ID NO: 18600 - protein, 36 aa, synthetic construct
QKVESLKQKIEELKQRKAQLKNDIANLEKEIAYAET

SEQ ID NO: 18601 - protein, 42 aa, synthetic construct
NLLATLRSTAAVLENENHVLEKEKEKLRKEKEQLLNKLEAYK

SEQ ID NO: 18602 - protein, 42 aa, synthetic construct
ELTDELKNKKEALRKDNAALLNELASLENEIANLEKEIAYFK

SEQ ID NO: 18603 - protein, 42 aa, synthetic construct
NEDLVLENRLAALRNENAALENDLARLEKEIAYLEKEIEREK

SEQ ID NO: 18604 - protein, 44 aa, synthetic construct
QKVEELKNKIAELENRNAVKKNRVAHLKQEIAYLKDELAAHEFE

SEQ ID NO: 18605 - protein, 47 aa, synthetic construct
NDLDAYEREAEKLEKKNEVLRNRLAALENELATLRQEVASMKQELQS

SEQ ID NO: 18606 - protein, 41 aa, synthetic construct
FENVTHEFILATLENENAKLRRLEAKLERELARLRNEVAWL

SEQ ID NO: 18607 - protein, 42 aa, synthetic construct
NILASLENKKEELKKLNAHLLKEIENLEKEIANLEKEIAYFK

SEQ ID NO: 18608 - protein, 42 aa, synthetic construct
NEKEELKSKKAELRNRIEQLKQKREQLKQKIANLRKEIEAYK

SEQ ID NO: 18609 - protein, 41 aa, synthetic construct
SIAATLENDLARLENENARLEKDIANLERDLAKLEREEAYF

SEQ ID NO: 18610 - protein, 45 aa, synthetic construct
NELESLENKKEELKNRNEELKQKREQLKQKLAALRNKLDAYKNRL

SEQ ID NO: 18611 - protein, 44 aa, synthetic construct
STVEELLRAIQELEKRNAELKNRKEELKNLVAHLRQELAAHKYE

SEQ ID NO: 18612 - protein, 42 aa, synthetic construct
NEVAQLENDVAVIENENAYLEKEIARLRKEIAALRDRLAHKK

SEQ ID NO: 18613 - protein, 50 aa, synthetic construct
KRIAYLRKKIAALKKDNANLEKDIANLENEIERLIKEIKTLENEVASHEQ

SEQ ID NO: 18614 - protein, 273 aa, synthetic construct
CFAKGTNVLMADGSIECIENIEVGNKVMGKDGRPREVIKLPRGRETMYSVVQKSQHRAHKSDSSREVPELLKFTCNATHELVVRTPRSVRRLSRTIKGVEYFEVITFEMGQKKAPDGRIVELVKEVSKSYPISEGPERANELVESYRKASNKAYFEWTIEARDLSLLGSHVRKATYQTYAPILYENDHFFDYMQKSKFHLTIEGPKVLAYLLGLWIGDGLSDRATFSVDSRDTSLMERVTEYAEKLNLCAEYKDRKEPQVAKTVNLYSKVVRG

SEQ ID NO: 18615 - protein, 183 aa, synthetic construct
GHGGIRNNLNTENPLWDAIVGLGFLKDGVKNIPSFLSTDNIGTRETFLAGLIDSDGYVTDEHGIKATIKTIHTSVRDGLVSLARSLGLVVSVNAEPAKVDMNVTKHKISYAIYMSGGDVLLNVLSKCAGSKKFRPAPAAAFARECRGFYFELQELKEDDYYGITLSDDSDHQFLLGSQVVVQN

SEQ ID NO: 18616 - protein, 192 aa, synthetic construct
GHGGIRNNLNTENPLWDAIVGLGFLKDGVKNIPSFLSTDNIGTRETFLAGLIDSDGYVTDEHGIKATIKTIHTSVRDGLVSLARSLGLVVSVNAEPAKVDMNVTKHKISYAIYMSGGDVLLNVLSKCAGSKKFRPAPAAAFARECRGFYFELQELKEDDYYGITLSDDSDHQFLLGSQVVVQNCGERGNGSG

SEQ ID NO: 18617 - protein, 192 aa, synthetic construct
GHGGIRNNLNTENPLWDAIVGLGFLKDGVKNIPSFLSTDNIGTRETFLAGLIDSDGYVTDEHGIKATIKTIHTSVRDGLVSLARSLGLVVSVNAEPAKVDMNVTKHKISYAIYMSGGDVLLNVLSKCAGSKKFRPAPAAAFARECRGFYFELQELKEDDYYGITLSDDSDHQFLLGSQVVVQNCTMTEKGSG

SEQ ID NO: 18618 - protein, 192 aa, synthetic construct
GHGGIRNNLNTENPLWDAIVGLGFLKDGVKNIPSFLSTDNIGTRETFLAGLIDSDGYVTDEHGIKATIKTIHTSVRDGLVSLARSLGLVVSVNAEPAKVDMNVTKHKISYAIYMSGGDVLLNVLSKCAGSKKFRPAPAAAFARECRGFYFELQELKEDDYYGITLSDDSDHQFLLGSQVVVQNCGEKSMGSG

SEQ ID NO: 18619 - protein, 65 aa, synthetic construct
VLLNVLSKCAGSKKFRPAPAAAFARECRGFYFELQELKEDDYYGITLSDDSDHQFLLANQVVVHN

SEQ ID NO: 18620 - protein, 74 aa, synthetic construct
VLLNVLSKCAGSKKFRPAPAAAFARECRGFYFELQELKEDDYYGITLSDDSDHQFLLANQVVVHNCGERGNGSG

SEQ ID NO: 18621 - protein, 74 aa, synthetic construct
VLLNVLSKCAGSKKFRPAPAAAFARECRGFYFELQELKEDDYYGITLSDDSDHQFLLANQVVVHNCTMTEKGSG

SEQ ID NO: 18622 - protein, 74 aa, synthetic construct
VLLNVLSKCAGSKKFRPAPAAAFARECRGFYFELQELKEDDYYGITLSDDSDHQFLLANQVVVHNCGEKSMGSG

SEQ ID NO: 18623 - protein, 280 aa, synthetic construct
GGIIYVGCFAKGTNVLMADGSIECIENIEVGNKVMGKDGRPREVIKLPRGRETMYSVVQKSQHRAHKSDSSREVPELLKFTCNATHELVVRTPRSVRRLSRTIKGVEYFEVITFEMGQKKAPDGRIVELVKEVSKSYPISEGPERANELVESYRKASNKAYFEWTIEARDLSLLGSHVRKATYQTYAPILYENDHFFDYMQKSKFHLTIEGPKVLAYLLGLWIGDGLSDRATFSVDSRDTSLMERVTEYAEKLNLCAEYKDRKEPQVAKTVNLYSKVVRG

SEQ ID NO: 18624 - protein, 281 aa, synthetic construct
GGVVLEKGCFAKGTNVLMADGSIECIENIEVGNKVMGKDGRPREVIKLPRGRETMYSVVQKSQHRAHKSDSSREVPELLKFTCNATHELVVRTPRSVRRLSRTIKGVEYFEVITFEMGQKKAPDGRIVELVKEVSKSYPISEGPERANELVESYRKASNKAYFEWTIEARDLSLLGSHVRKATYQTYAPILYENDHFFDYMQKSKFHLTIEGPKVLAYLLGLWIGDGLSDRATFSVDSRDTSLMERVTEYAEKLNLCAEYKDRKEPQVAKTVNLYSKVVRG

SEQ ID NO: 18625 - protein, 280 aa, synthetic construct
GGFQTVGCFAKGTNVLMADGSIECIENIEVGNKVMGKDGRPREVIKLPRGRETMYSVVQKSQHRAHKSDSSREVPELLKFTCNATHELVVRTPRSVRRLSRTIKGVEYFEVITFEMGQKKAPDGRIVELVKEVSKSYPISEGPERANELVESYRKASNKAYFEWTIEARDLSLLGSHVRKATYQTYAPILYENDHFFDYMQKSKFHLTIEGPKVLAYLLGLWIGDGLSDRATFSVDSRDTSLMERVTEYAEKLNLCAEYKDRKEPQVAKTVNLYSKVVRG

SEQ ID NO: 18626 - protein, 182 aa, synthetic construct
CFAKGTNVLMADGSIECIENIEVGNKVMGKDGRPREVIKLPRGRETMYSVVQKSQHRAHKSDSSREVPELLKFTCNATHELVVRTPRSVRRLSRTIKGVEYFEVITFEMGQKKAPDGRIVELVKEVSKSYPISEGPERANELVESYRKASNKAYFEWTIEARDLSLLGSHVRKATYQTYAPI

SEQ ID NO: 18627 - protein, 189 aa, synthetic construct
GGIIYVGCFAKGTNVLMADGSIECIENIEVGNKVMGKDGRPREVIKLPRGRETMYSVVQKSQHRAHKSDSSREVPELLKFTCNATHELVVRTPRSVRRLSRTIKGVEYFEVITFEMGQKKAPDGRIVELVKEVSKSYPISEGPERANELVESYRKASNKAYFEWTIEARDLSLLGSHVRKATYQTYAPI

SEQ ID NO: 18628 - protein, 190 aa, synthetic construct
GGVVLEKGCFAKGTNVLMADGSIECIENIEVGNKVMGKDGRPREVIKLPRGRETMYSVVQKSQHRAHKSDSSREVPELLKFTCNATHELVVRTPRSVRRLSRTIKGVEYFEVITFEMGQKKAPDGRIVELVKEVSKSYPISEGPERANELVESYRKASNKAYFEWTIEARDLSLLGSHVRKATYQTYAPI

SEQ ID NO: 18629 - protein, 189 aa, synthetic construct
GGFQTVGCFAKGTNVLMADGSIECIENIEVGNKVMGKDGRPREVIKLPRGRETMYSVVQKSQHRAHKSDSSREVPELLKFTCNATHELVVRTPRSVRRLSRTIKGVEYFEVITFEMGQKKAPDGRIVELVKEVSKSYPISEGPERANELVESYRKASNKAYFEWTIEARDLSLLGSHVRKATYQTYAPI

SEQ ID NO: 18630 - DNA, 76 bp, synthetic construct
  source 1..76: mol_type = other DNA
gttttagagctagaaatagcaagttaaaataaggctagtccgttatcaacttgaaaaagtggcaccgagtcggtgc

SEQ ID NO: 18631 - DNA, 24 bp, synthetic construct
  source 1..24: mol_type = other DNA
gttgtagctccctttctcatttcg

SEQ ID NO: 18632 - DNA, 93 bp, synthetic construct
  source 1..93: mol_type = other DNA
cgaaatgagaaccgttgctacaataaggccgtctgaaaagatgtgccgcaacgctctgccccttaaagcttctgctttaaggggcatcgttta

SEQ ID NO: 18633 - DNA, 25 bp, synthetic construct
  source 1..25: mol_type = other DNA
gttgtagctccctttttcatttcgc

SEQ ID NO: 18634 - DNA, 82 bp, synthetic construct
  source 1..82: mol_type = other DNA
gcgaaatgaaaaacgttgttacaataagagatgaatttctcgcaaagctctgcctcttgaaatttcggtttcaagaggcatc

SEQ ID NO: 18635 - DNA, 14 bp, synthetic construct
  source 1..14: mol_type = other DNA
gttttagtactctg

SEQ ID NO: 18636 - DNA, 58 bp, synthetic construct
  source 1..58: mol_type = other DNA
cagaatctactaaaacaaggcaaaatgccgtgtttatctcgtcaacttgttggcgaga

SEQ ID NO: 18637 - DNA, 12 bp, synthetic construct
  source 1..12: mol_type = other DNA
gttttagagcta

SEQ ID NO: 18638 - DNA, 60 bp, synthetic construct
  source 1..60: mol_type = other DNA
tagcaagttaaaataaggctagtccgttatcaacttgaaaaagtggcaccgagtcggtgc

SEQ ID NO: 18639 - DNA, 14 bp, synthetic construct
  source 1..14: mol_type = other DNA
gtctttgtactctg

SEQ ID NO: 18640 - DNA, 66 bp, synthetic construct
  source 1..66: mol_type = other DNA
cagaagctacaaagataaggcttcatgccgaaatcaacaccctgtcattttatggcagggtgtttt

SEQ ID NO: 18641 - DNA, 16 bp, synthetic construct
  source 1..16: mol_type = other DNA
gctatagttccttact

SEQ ID NO: 18642 - DNA, 127 bp, synthetic construct
  source 1..127: mol_type = other DNA
ggtaagttgctatagtaagggcaacagacccgaggcgttggggatcgcctagcccgtgtttacgggctctccccatattcaaaataatgacagacgagcaccttggagcatttatctccgaggtgct

SEQ ID NO: 18643 - DNA, 14 bp, synthetic construct
  source 1..14: mol_type = other DNA
gtcttagtactctg

SEQ ID NO: 18644 - DNA, 58 bp, synthetic construct
  source 1..58: mol_type = other DNA
cagaatctactaagacaaggcaaaatgccgtgtttatctcgtcaacttgttggcgaga

SEQ ID NO: 18645 - DNA, 12 bp, synthetic construct
  source 1..12: mol_type = other DNA
actggggttcag

SEQ ID NO: 18646 - DNA, 76 bp, synthetic construct
  source 1..76: mol_type = other DNA
ctgaacctcagtaagcattggctcgtttccaatgttgattgctccgccggtgctccttatttttaagggcgccggc

SEQ ID NO: 18647 - DNA, 12 bp, synthetic construct
  source 1..12: mol_type = other DNA
gttttagtccct

SEQ ID NO: 18648 - DNA, 57 bp, synthetic construct
  source 1..57: mol_type = other DNA
agggactaaaataaagagtttgcgggactctgcggggttacaatcccctaaaaccgc

SEQ ID NO: 18649 - DNA, 16 bp, synthetic construct
  source 1..16: mol_type = other DNA
gtcatagttcccctga

SEQ ID NO: 18650 - DNA, 98 bp, synthetic construct
  source 1..98: mol_type = other DNA
tcagggttactatgataagggctttctgcctaaggcagactgacccgcggcgttggggatcgcctgtcgcccgcttttggcgggcattccccatcctt

SEQ ID NO: 18651 - DNA, 17 bp, synthetic construct
  source 1..17: mol_type = other DNA
gtttaagagctatgctg

SEQ ID NO: 18652 - DNA, 65 bp, synthetic construct
  source 1..65: mol_type = other DNA
cagcatagcaagtttaaataaggctagtccgttatcaacttgaaaaagtggcaccgagtcggtgc

SEQ ID NO: 18653 - DNA, 62 bp, synthetic construct
  source 1..62: mol_type = other DNA
cagaatctactgaaacaagacaatatgtcgtgtttatcccatcaatttattggtgggatttt

SEQ ID NO: 18654 - DNA, 23 bp, synthetic construct
  source 1..23: mol_type = other DNA
gcacatgaggatcacccatgtgc

SEQ ID NO: 18655 - DNA, 29 bp, synthetic construct
  source 1..29: mol_type = other DNA
cataaggagtttatatggaaacccttatg

SEQ ID NO: 18656 - DNA, 25 bp, synthetic construct
  source 1..25: mol_type = other DNA
taaggagtttatatggaaaccctta

SEQ ID NO: 18657 - DNA, 19 bp, synthetic construct
  source 1..19: mol_type = other DNA
ctgaatgcctgcgagcatc

SEQ ID NO: 18658 - DNA, 56 bp, synthetic construct
  source 1..56: mol_type = other DNA
ggcagagaaaggccatacaatcattggccttgtgaggccgtgtgtcttccagtggc

SEQ ID NO: 18659 - DNA, 54 bp, synthetic construct
  source 1..54: mol_type = other DNA
ggcagagaaaggccatacaatcattggcttttccatgacgccagttccagtggc

SEQ ID NO: 18660 - DNA, 19 bp, synthetic construct
  source 1..19: mol_type = other DNA
gggccctgaagaagggccc

SEQ ID NO: 18661 - DNA, 27 bp, synthetic construct
  source 1..27: mol_type = other DNA
ggatccgtgatcggaaacgtgagatcc

SEQ ID NO: 18662 - DNA, 38 bp, synthetic construct
  source 1..38: mol_type = other DNA
ggtggcagagaaaggcgaaagccttgtgaggccatcaa

SEQ ID NO: 18663 - DNA, 35 bp, synthetic construct
  source 1..35: mol_type = other DNA
ggatgcagagaacgaaagttccatgacgcatccaa

SEQ ID NO: 18664 - DNA, 11 bp, synthetic construct
  source 1..11: mol_type = other DNA
ggtggtggtgg

SEQ ID NO: 18665 - DNA, 12 bp, synthetic construct
  source 1..12: mol_type = other DNA
ggacttcggtcc

SEQ ID NO: 18666 - DNA, 36 bp, synthetic construct
  source 1..36: mol_type = other DNA
ctcatagttcccctgagaaatcagggttactatgag

SEQ ID NO: 18667 - DNA, 121 bp, synthetic construct
  source 1..121: mol_type = other DNA
gttgtagctccctttctcatttcggaaacgaaatgagaaccgttgctacaataaggccgtctgaaaagatgtgccgcaacgctctgccccttaaagcttctgctttaaggggcatcgttta

SEQ ID NO: 18668 - DNA, 141 bp, synthetic construct
  source 1..141: mol_type = other DNA
cagtacatgaccttacgggagttgtagctccctttctcatttcggaaacgaaatgagaaccgttgctacaataaggccgtctgaaaagatgtgccgcaacgctctgccccttaaagcttctgctttaaggggcatcgttta

SEQ ID NO: 18669 - DNA, 137 bp, synthetic construct
  source 1..137: mol_type = other DNA
acatgaccttacgggagttgtagctccctttctcatttcggaaacgaaatgagaaccgttgctacaataaggccgtctgaaaagatgtgccgcaacgctctgccccttaaagcttctgctttaaggggcatcgttta

SEQ ID NO: 18670 - DNA, 147 bp, synthetic construct
  source 1..147: mol_type = other DNA
gctatagttccttactgaaaggtaagttgctatagtaagggcaacagacccgaggcgttggggatcgcctagcccgtgtttacgggctctccccatattcaaaataatgacagacgagcaccttggagcatttatctccgaggtgct

SEQ ID NO: 18671 - DNA, 118 bp, synthetic construct
  source 1..118: mol_type = other DNA
gtcatagttcccctgagaaatcagggttactatgataagggctttctgcctaaggcagactgacccgcggcgttggggatcgcctgtcgcccgcttttggcgggcattccccatcctt

SEQ ID NO: 18672 - DNA, 111 bp, synthetic construct
  source 1..111: mol_type = other DNA
gttgtagctccctttttcatttcgcgaaagcgaaatgaaaaacgttgttacaataagagatgaatttctcgcaaagctctgcctcttgaaatttcggtttcaagaggcatc

SEQ ID NO: 18673 - DNA, 92 bp, synthetic construct
  source 1..92: mol_type = other DNA
actggggttcaggaaactgaacctcagtaagcattggctcgtttccaatgttgattgctccgccggtgctccttatttttaagggcgccggc

SEQ ID NO: 18674 - DNA, 85 bp, synthetic construct
  source 1..85: mol_type = other DNA
gttttagagctagaaatagcaagttaaaataaggctagtccgttatcaacttgaaaaagtggcaccgggacttcggtcccggtgc

SEQ ID NO: 18675 - DNA, 84 bp, synthetic construct
  source 1..84: mol_type = other DNA
gtctttgtactctggtaccagaagctacaaagataaggcttcatgccgaaatcaacaccctgtcattttatggcagggtgtttt

SEQ ID NO: 18676 - DNA, 76 bp, synthetic construct
  source 1..76: mol_type = other DNA
gtcttagtactctggaaacagaatctactaagacaaggcaaaatgccgtgtttatctcgtcaacttgttggcgaga

SEQ ID NO: 18677 - DNA, 86 bp, synthetic construct
  source 1..86: mol_type = other DNA
gtttaagagctatgctggaaacagcatagcaagtttaaataaggctagtccgttatcaacttgaaaaagtggcaccgagtcggtgc

SEQ ID NO: 18678 - DNA, 76 bp, synthetic construct
  source 1..76: mol_type = other DNA
gttttagtactctggaaacagaatctactaaaacaaggcaaaatgccgtgtttatctcgtcaacttgttggcgaga

SEQ ID NO: 18679 - DNA, 73 bp, synthetic construct
  source 1..73: mol_type = other DNA
gttttagtccctgaaaagggactaaaataaagagtttgcgggactctgcggggttacaatcccctaaaaccgc

SEQ ID NO: 18680 - DNA, 250 bp, synthetic construct
  source 1..250: mol_type = other DNA
agaattttgtaatacgactcactatagggcggccgggaattcgccaccatggtgagcaagggcgaggagctgttcaccggggtggtgcccatcctggtcgagctggacggcgacgtaaacggccacaagttcagcgtgtccggcgagggcgagggcgatgccacctacggcaagctgaccctgaagttcatctgcaccaccggcaagctgcccgtgccctggcccaccctcgtgaccaccctgacgtacg

SEQ ID NO: 18681 - DNA, 250 bp, synthetic construct
  source 1..250: mol_type = other DNA
cagaattttgtaatacgactcactatagggcggccgggaattcgccaccatggtgagcaagggcgaggagctgttcaccggggtggtgcccatcctggtcgagctggacggcgacgtaaacggccacaagttcagcgtgtccggcgagggcgagggcgatgccacctacggcaagctgaccctgaagttcatctgcaccaccggcaagctgcccgtgccctggcccaccctcgtgaccaccctgacgtac

SEQ ID NO: 18682 - DNA, 250 bp, synthetic construct
  source 1..250: mol_type = other DNA
tcagaattttgtaatacgactcactatagggcggccgggaattcgccaccatggtgagcaagggcgaggagctgttcaccggggtggtgcccatcctggtcgagctggacggcgacgtaaacggccacaagttcagcgtgtccggcgagggcgagggcgatgccacctacggcaagctgaccctgaagttcatctgcaccaccggcaagctgcccgtgccctggcccaccctcgtgaccaccctgacgta

SEQ ID NO: 18683 - DNA, 250 bp, synthetic construct
  source 1..250: mol_type = other DNA
gtcagaattttgtaatacgactcactatagggcggccgggaattcgccaccatggtgagcaagggcgaggagctgttcaccggggtggtgcccatcctggtcgagctggacggcgacgtaaacggccacaagttcagcgtgtccggcgagggcgagggcgatgccacctacggcaagctgaccctgaagttcatctgcaccaccggcaagctgcccgtgccctggcccaccctcgtgaccaccctgacgt

SEQ ID NO: 18684 - DNA, 250 bp, synthetic construct
  source 1..250: mol_type = other DNA
cgtcagaattttgtaatacgactcactatagggcggccgggaattcgccaccatggtgagcaagggcgaggagctgttcaccggggtggtgcccatcctggtcgagctggacggcgacgtaaacggccacaagttcagcgtgtccggcgagggcgagggcgatgccacctacggcaagctgaccctgaagttcatctgcaccaccggcaagctgcccgtgccctggcccaccctcgtgaccaccctgacg

SEQ ID NO: 18685 - DNA, 250 bp, synthetic construct
  source 1..250: mol_type = other DNA
ccgtcagaattttgtaatacgactcactatagggcggccgggaattcgccaccatggtgagcaagggcgaggagctgttcaccggggtggtgcccatcctggtcgagctggacggcgacgtaaacggccacaagttcagcgtgtccggcgagggcgagggcgatgccacctacggcaagctgaccctgaagttcatctgcaccaccggcaagctgcccgtgccctggcccaccctcgtgaccaccctgac

SEQ ID NO: 18686 - DNA, 250 bp, synthetic construct
  source 1..250: mol_type = other DNA
accgtcagaattttgtaatacgactcactatagggcggccgggaattcgccaccatggtgagcaagggcgaggagctgttcaccggggtggtgcccatcctggtcgagctggacggcgacgtaaacggccacaagttcagcgtgtccggcgagggcgagggcgatgccacctacggcaagctgaccctgaagttcatctgcaccaccggcaagctgcccgtgccctggcccaccctcgtgaccaccctga

SEQ ID NO: 18687 - DNA, 250 bp, synthetic construct
  source 1..250: mol_type = other DNA
aaccgtcagaattttgtaatacgactcactatagggcggccgggaattcgccaccatggtgagcaagggcgaggagctgttcaccggggtggtgcccatcctggtcgagctggacggcgacgtaaacggccacaagttcagcgtgtccggcgagggcgagggcgatgccacctacggcaagctgaccctgaagttcatctgcaccaccggcaagctgcccgtgccctggcccaccctcgtgaccaccctg

SEQ ID NO: 18688 - DNA, 250 bp, synthetic construct
  source 1..250: mol_type = other DNA
gaaccgtcagaattttgtaatacgactcactatagggcggccgggaattcgccaccatggtgagcaagggcgaggagctgttcaccggggtggtgcccatcctggtcgagctggacggcgacgtaaacggccacaagttcagcgtgtccggcgagggcgagggcgatgccacctacggcaagctgaccctgaagttcatctgcaccaccggcaagctgcccgtgccctggcccaccctcgtgaccaccct

SEQ ID NO: 18689 - DNA, 250 bp, synthetic construct
  source 1..250: mol_type = other DNA
tgaaccgtcagaattttgtaatacgactcactatagggcggccgggaattcgccaccatggtgagcaagggcgaggagctgttcaccggggtggtgcccatcctggtcgagctggacggcgacgtaaacggccacaagttcagcgtgtccggcgagggcgagggcgatgccacctacggcaagctgaccctgaagttcatctgcaccaccggcaagctgcccgtgccctggcccaccctcgtgaccaccc

SEQ ID NO: 18690 - DNA, 250 bp, synthetic construct
  source 1..250: mol_type = other DNA
gtgaaccgtcagaattttgtaatacgactcactatagggcggccgggaattcgccaccatggtgagcaagggcgaggagctgttcaccggggtggtgcccatcctggtcgagctggacggcgacgtaaacggccacaagttcagcgtgtccggcgagggcgagggcgatgccacctacggcaagctgaccctgaagttcatctgcaccaccggcaagctgcccgtgccctggcccaccctcgtgaccacc

SEQ ID NO: 18691 - DNA, 10 bp, synthetic construct
  source 1..10: mol_type = other DNA
ctgacgtacg

SEQ ID NO: 18692 - DNA, 250 bp, synthetic construct
  source 1..250: mol_type = other DNA
agtgaaccgtcagaattttgtaatacgactcactatagggcggccgggaattcgccaccatggtgagcaagggcgaggagctgttcaccggggtggtgcccatcctggtcgagctggacggcgacgtaaacggccacaagttcagcgtgtccggcgagggcgagggcgatgccacctacggcaagctgaccctgaagttcatctgcaccaccggcaagctgcccgtgccctggcccaccctcgtgaccac

SEQ ID NO: 18693 - DNA, 11 bp, synthetic construct
  source 1..11: mol_type = other DNA
cctgacgtacg

SEQ ID NO: 18694 - DNA, 250 bp, synthetic construct
  source 1..250: mol_type = other DNA
tagtgaaccgtcagaattttgtaatacgactcactatagggcggccgggaattcgccaccatggtgagcaagggcgaggagctgttcaccggggtggtgcccatcctggtcgagctggacggcgacgtaaacggccacaagttcagcgtgtccggcgagggcgagggcgatgccacctacggcaagctgaccctgaagttcatctgcaccaccggcaagctgcccgtgccctggcccaccctcgtgacca

SEQ ID NO: 18695 - DNA, 12 bp, synthetic construct
  source 1..12: mol_type = other DNA
ccctgacgtacg

SEQ ID NO: 18696 - DNA, 250 bp, synthetic construct
  source 1..250: mol_type = other DNA
ttagtgaaccgtcagaattttgtaatacgactcactatagggcggccgggaattcgccaccatggtgagcaagggcgaggagctgttcaccggggtggtgcccatcctggtcgagctggacggcgacgtaaacggccacaagttcagcgtgtccggcgagggcgagggcgatgccacctacggcaagctgaccctgaagttcatctgcaccaccggcaagctgcccgtgccctggcccaccctcgtgacc

SEQ ID NO: 18697 - DNA, 13 bp, synthetic construct
  source 1..13: mol_type = other DNA
accctgacgtacg

SEQ ID NO: 18698 - DNA, 250 bp, synthetic construct
  source 1..250: mol_type = other DNA
tttagtgaaccgtcagaattttgtaatacgactcactatagggcggccgggaattcgccaccatggtgagcaagggcgaggagctgttcaccggggtggtgcccatcctggtcgagctggacggcgacgtaaacggccacaagttcagcgtgtccggcgagggcgagggcgatgccacctacggcaagctgaccctgaagttcatctgcaccaccggcaagctgcccgtgccctggcccaccctcgtgac

SEQ ID NO: 18699 - DNA, 14 bp, synthetic construct
  source 1..14: mol_type = other DNA
caccctgacgtacg

SEQ ID NO: 18700 - DNA, 250 bp, synthetic construct
  source 1..250: mol_type = other DNA
gtttagtgaaccgtcagaattttgtaatacgactcactatagggcggccgggaattcgccaccatggtgagcaagggcgaggagctgttcaccggggtggtgcccatcctggtcgagctggacggcgacgtaaacggccacaagttcagcgtgtccggcgagggcgagggcgatgccacctacggcaagctgaccctgaagttcatctgcaccaccggcaagctgcccgtgccctggcccaccctcgtga

SEQ ID NO: 18701 - DNA, 15 bp, synthetic construct
  source 1..15: mol_type = other DNA
ccaccctgacgtacg

SEQ ID NO: 18702 - DNA, 250 bp, synthetic construct
  source 1..250: mol_type = other DNA
cgtttagtgaaccgtcagaattttgtaatacgactcactatagggcggccgggaattcgccaccatggtgagcaagggcgaggagctgttcaccggggtggtgcccatcctggtcgagctggacggcgacgtaaacggccacaagttcagcgtgtccggcgagggcgagggcgatgccacctacggcaagctgaccctgaagttcatctgcaccaccggcaagctgcccgtgccctggcccaccctcgtg

SEQ ID NO: 18703 - DNA, 16 bp, synthetic construct
  source 1..16: mol_type = other DNA
accaccctgacgtacg

SEQ ID NO: 18704 - DNA, 250 bp, synthetic construct
  source 1..250: mol_type = other DNA
tcgtttagtgaaccgtcagaattttgtaatacgactcactatagggcggccgggaattcgccaccatggtgagcaagggcgaggagctgttcaccggggtggtgcccatcctggtcgagctggacggcgacgtaaacggccacaagttcagcgtgtccggcgagggcgagggcgatgccacctacggcaagctgaccctgaagttcatctgcaccaccggcaagctgcccgtgccctggcccaccctcgt

SEQ ID NO: 18705 - DNA, 17 bp, synthetic construct
  source 1..17: mol_type = other DNA
gaccaccctgacgtacg

SEQ ID NO: 18706 - DNA, 250 bp, synthetic construct
  source 1..250: mol_type = other DNA
ctcgtttagtgaaccgtcagaattttgtaatacgactcactatagggcggccgggaattcgccaccatggtgagcaagggcgaggagctgttcaccggggtggtgcccatcctggtcgagctggacggcgacgtaaacggccacaagttcagcgtgtccggcgagggcgagggcgatgccacctacggcaagctgaccctgaagttcatctgcaccaccggcaagctgcccgtgccctggcccaccctcg

SEQ ID NO: 18707 - DNA, 18 bp, synthetic construct
  source 1..18: mol_type = other DNA
tgaccaccctgacgtacg

SEQ ID NO: 18708 - DNA, 250 bp, synthetic construct
  source 1..250: mol_type = other DNA
gctcgtttagtgaaccgtcagaattttgtaatacgactcactatagggcggccgggaattcgccaccatggtgagcaagggcgaggagctgttcaccggggtggtgcccatcctggtcgagctggacggcgacgtaaacggccacaagttcagcgtgtccggcgagggcgagggcgatgccacctacggcaagctgaccctgaagttcatctgcaccaccggcaagctgcccgtgccctggcccaccctc

SEQ ID NO: 18709 - DNA, 19 bp, synthetic construct
  source 1..19: mol_type = other DNA
gtgaccaccctgacgtacg

SEQ ID NO: 18710 - DNA, 250 bp, synthetic construct
  source 1..250: mol_type = other DNA
agctcgtttagtgaaccgtcagaattttgtaatacgactcactatagggcggccgggaattcgccaccatggtgagcaagggcgaggagctgttcaccggggtggtgcccatcctggtcgagctggacggcgacgtaaacggccacaagttcagcgtgtccggcgagggcgagggcgatgccacctacggcaagctgaccctgaagttcatctgcaccaccggcaagctgcccgtgccctggcccaccct

SEQ ID NO: 18711 - DNA, 20 bp, synthetic construct
  source 1..20: mol_type = other DNA
cgtgaccaccctgacgtacg

SEQ ID NO: 18712 - DNA, 11 bp, synthetic construct
  source 1..11: mol_type = other DNA
accaccctgac

SEQ ID NO: 18713 - DNA, 12 bp, synthetic construct
  source 1..12: mol_type = other DNA
gaccaccctgac

SEQ ID NO: 18714 - DNA, 13 bp, synthetic construct
  source 1..13: mol_type = other DNA
tgaccaccctgac

SEQ ID NO: 18715 - DNA, 14 bp, synthetic construct
  source 1..14: mol_type = other DNA
gtgaccaccctgac

SEQ ID NO: 18716 - DNA, 16 bp, synthetic construct
  source 1..16: mol_type = other DNA
tcgtgaccaccctgac

SEQ ID NO: 18717 - DNA, 20 bp, synthetic construct
  source 1..20: mol_type = other DNA
accctcgtgaccaccctgac

SEQ ID NO: 18718 - DNA, 24 bp, synthetic construct
  source 1..24: mol_type = other DNA
gcccaccctcgtgaccaccctgac

SEQ ID NO: 18719 - DNA, 25 bp, synthetic construct
  source 1..25: mol_type = other DNA
ggcccaccctcgtgaccaccctgac

SEQ ID NO: 18720 - DNA, 500 bp, synthetic construct
  source 1..500: mol_type = other DNA
cccgcctggctgaccgcccaacgacccccgcccattgacgtcaataatgacgtatgttcccatagtaacgccaatagggactttccattgacgtcaatgggtggagtatttacggtaaactgcccacttggcagtacatcaagtgtatcatatgccaagtccgccccctattgacgtcaatgacggtaaatggcccgcctggcattatgcccagtacatgaccttacgggactttcctacttggcagtacatctacgtattagtcatcgctattaccatggtgatgcggttttggcagtacaccaatgggcgtggatagcggtttgactcacggggatttccaagtctccaccccattgacgtcaatgggagtttgttttggcaccaaaatcaacgggactttccaaaatgtcgtaataaccccgccccgttgacgcaaatgggcggtaggcgtgtacggtgggaggtctatataagcagagctcgtttagtgaaccgtc

SEQ ID NO: 18721 - DNA, 499 bp, synthetic construct
  source 1..499: mol_type = other DNA
ccgcctggctgaccgcccaacgacccccgcccattgacgtcaataatgacgtatgttcccatagtaacgccaatagggactttccattgacgtcaatgggtggagtatttacggtaaactgcccacttggcagtacatcaagtgtatcatatgccaagtccgccccctattgacgtcaatgacggtaaatggcccgcctggcattatgcccagtacatgaccttacgggactttcctacttggcagtacatctacgtattagtcatcgctattaccatggtgatgcggttttggcagtacaccaatgggcgtggatagcggtttgactcacggggatttccaagtctccaccccattgacgtcaatgggagtttgttttggcaccaaaatcaacgggactttccaaaatgtcgtaataaccccgccccgttgacgcaaatgggcggtaggcgtgtacggtgggaggtctatataagcagagctcgtttagtgaaccgtc

SEQ ID NO: 18722 - DNA, 498 bp, synthetic construct
  source 1..498: mol_type = other DNA
cgcctggctgaccgcccaacgacccccgcccattgacgtcaataatgacgtatgttcccatagtaacgccaatagggactttccattgacgtcaatgggtggagtatttacggtaaactgcccacttggcagtacatcaagtgtatcatatgccaagtccgccccctattgacgtcaatgacggtaaatggcccgcctggcattatgcccagtacatgaccttacgggactttcctacttggcagtacatctacgtattagtcatcgctattaccatggtgatgcggttttggcagtacaccaatgggcgtggatagcggtttgactcacggggatttccaagtctccaccccattgacgtcaatgggagtttgttttggcaccaaaatcaacgggactttccaaaatgtcgtaataaccccgccccgttgacgcaaatgggcggtaggcgtgtacggtgggaggtctatataagcagagctcgtttagtgaaccgtc

SEQ ID NO: 18723 - DNA, 497 bp, synthetic construct
  source 1..497: mol_type = other DNA
gcctggctgaccgcccaacgacccccgcccattgacgtcaataatgacgtatgttcccatagtaacgccaatagggactttccattgacgtcaatgggtggagtatttacggtaaactgcccacttggcagtacatcaagtgtatcatatgccaagtccgccccctattgacgtcaatgacggtaaatggcccgcctggcattatgcccagtacatgaccttacgggactttcctacttggcagtacatctacgtattagtcatcgctattaccatggtgatgcggttttggcagtacaccaatgggcgtggatagcggtttgactcacggggatttccaagtctccaccccattgacgtcaatgggagtttgttttggcaccaaaatcaacgggactttccaaaatgtcgtaataaccccgccccgttgacgcaaatgggcggtaggcgtgtacggtgggaggtctatataagcagagctcgtttagtgaaccgtc

SEQ ID NO: 18724 - DNA, 496 bp, synthetic construct
  source 1..496: mol_type = other DNA
cctggctgaccgcccaacgacccccgcccattgacgtcaataatgacgtatgttcccatagtaacgccaatagggactttccattgacgtcaatgggtggagtatttacggtaaactgcccacttggcagtacatcaagtgtatcatatgccaagtccgccccctattgacgtcaatgacggtaaatggcccgcctggcattatgcccagtacatgaccttacgggactttcctacttggcagtacatctacgtattagtcatcgctattaccatggtgatgcggttttggcagtacaccaatgggcgtggatagcggtttgactcacggggatttccaagtctccaccccattgacgtcaatgggagtttgttttggcaccaaaatcaacgggactttccaaaatgtcgtaataaccccgccccgttgacgcaaatgggcggtaggcgtgtacggtgggaggtctatataagcagagctcgtttagtgaaccgtc

SEQ ID NO: 18725 - DNA, 495 bp, synthetic construct
  source 1..495: mol_type = other DNA
ctggctgaccgcccaacgacccccgcccattgacgtcaataatgacgtatgttcccatagtaacgccaatagggactttccattgacgtcaatgggtggagtatttacggtaaactgcccacttggcagtacatcaagtgtatcatatgccaagtccgccccctattgacgtcaatgacggtaaatggcccgcctggcattatgcccagtacatgaccttacgggactttcctacttggcagtacatctacgtattagtcatcgctattaccatggtgatgcggttttggcagtacaccaatgggcgtggatagcggtttgactcacggggatttccaagtctccaccccattgacgtcaatgggagtttgttttggcaccaaaatcaacgggactttccaaaatgtcgtaataaccccgccccgttgacgcaaatgggcggtaggcgtgtacggtgggaggtctatataagcagagctcgtttagtgaaccgtc

SEQ ID NO: 18726 - DNA, 494 bp, synthetic construct
  source 1..494: mol_type = other DNA
tggctgaccgcccaacgacccccgcccattgacgtcaataatgacgtatgttcccatagtaacgccaatagggactttccattgacgtcaatgggtggagtatttacggtaaactgcccacttggcagtacatcaagtgtatcatatgccaagtccgccccctattgacgtcaatgacggtaaatggcccgcctggcattatgcccagtacatgaccttacgggactttcctacttggcagtacatctacgtattagtcatcgctattaccatggtgatgcggttttggcagtacaccaatgggcgtggatagcggtttgactcacggggatttccaagtctccaccccattgacgtcaatgggagtttgttttggcaccaaaatcaacgggactttccaaaatgtcgtaataaccccgccccgttgacgcaaatgggcggtaggcgtgtacggtgggaggtctatataagcagagctcgtttagtgaaccgtc

SEQ ID NO: 18727 - DNA, 493 bp, synthetic construct
  source 1..493: mol_type = other DNA
ggctgaccgcccaacgacccccgcccattgacgtcaataatgacgtatgttcccatagtaacgccaatagggactttccattgacgtcaatgggtggagtatttacggtaaactgcccacttggcagtacatcaagtgtatcatatgccaagtccgccccctattgacgtcaatgacggtaaatggcccgcctggcattatgcccagtacatgaccttacgggactttcctacttggcagtacatctacgtattagtcatcgctattaccatggtgatgcggttttggcagtacaccaatgggcgtggatagcggtttgactcacggggatttccaagtctccaccccattgacgtcaatgggagtttgttttggcaccaaaatcaacgggactttccaaaatgtcgtaataaccccgccccgttgacgcaaatgggcggtaggcgtgtacggtgggaggtctatataagcagagctcgtttagtgaaccgtc

SEQ ID NO: 18728 - DNA, 492 bp, synthetic construct
  source 1..492: mol_type = other DNA
gctgaccgcccaacgacccccgcccattgacgtcaataatgacgtatgttcccatagtaacgccaatagggactttccattgacgtcaatgggtggagtatttacggtaaactgcccacttggcagtacatcaagtgtatcatatgccaagtccgccccctattgacgtcaatgacggtaaatggcccgcctggcattatgcccagtacatgaccttacgggactttcctacttggcagtacatctacgtattagtcatcgctattaccatggtgatgcggttttggcagtacaccaatgggcgtggatagcggtttgactcacggggatttccaagtctccaccccattgacgtcaatgggagtttgttttggcaccaaaatcaacgggactttccaaaatgtcgtaataaccccgccccgttgacgcaaatgggcggtaggcgtgtacggtgggaggtctatataagcagagctcgtttagtgaaccgtc

SEQ ID NO: 18729 - DNA, 491 bp, synthetic construct
  source 1..491: mol_type = other DNA
ctgaccgcccaacgacccccgcccattgacgtcaataatgacgtatgttcccatagtaacgccaatagggactttccattgacgtcaatgggtggagtatttacggtaaactgcccacttggcagtacatcaagtgtatcatatgccaagtccgccccctattgacgtcaatgacggtaaatggcccgcctggcattatgcccagtacatgaccttacgggactttcctacttggcagtacatctacgtattagtcatcgctattaccatggtgatgcggttttggcagtacaccaatgggcgtggatagcggtttgactcacggggatttccaagtctccaccccattgacgtcaatgggagtttgttttggcaccaaaatcaacgggactttccaaaatgtcgtaataaccccgccccgttgacgcaaatgggcggtaggcgtgtacggtgggaggtctatataagcagagctcgtttagtgaaccgtc

SEQ ID NO: 18730 - DNA, 490 bp, synthetic construct
  source 1..490: mol_type = other DNA
tgaccgcccaacgacccccgcccattgacgtcaataatgacgtatgttcccatagtaacgccaatagggactttccattgacgtcaatgggtggagtatttacggtaaactgcccacttggcagtacatcaagtgtatcatatgccaagtccgccccctattgacgtcaatgacggtaaatggcccgcctggcattatgcccagtacatgaccttacgggactttcctacttggcagtacatctacgtattagtcatcgctattaccatggtgatgcggttttggcagtacaccaatgggcgtggatagcggtttgactcacggggatttccaagtctccaccccattgacgtcaatgggagtttgttttggcaccaaaatcaacgggactttccaaaatgtcgtaataaccccgccccgttgacgcaaatgggcggtaggcgtgtacggtgggaggtctatataagcagagctcgtttagtgaaccgtc

SEQ ID NO: 18731 - DNA, 489 bp, synthetic construct
  source 1..489: mol_type = other DNA
gaccgcccaacgacccccgcccattgacgtcaataatgacgtatgttcccatagtaacgccaatagggactttccattgacgtcaatgggtggagtatttacggtaaactgcccacttggcagtacatcaagtgtatcatatgccaagtccgccccctattgacgtcaatgacggtaaatggcccgcctggcattatgcccagtacatgaccttacgggactttcctacttggcagtacatctacgtattagtcatcgctattaccatggtgatgcggttttggcagtacaccaatgggcgtggatagcggtttgactcacggggatttccaagtctccaccccattgacgtcaatgggagtttgttttggcaccaaaatcaacgggactttccaaaatgtcgtaataaccccgccccgttgacgcaaatgggcggtaggcgtgtacggtgggaggtctatataagcagagctcgtttagtgaaccgtc

SEQ ID NO: 18732 - DNA, 488 bp, synthetic construct
  source 1..488: mol_type = other DNA
accgcccaacgacccccgcccattgacgtcaataatgacgtatgttcccatagtaacgccaatagggactttccattgacgtcaatgggtggagtatttacggtaaactgcccacttggcagtacatcaagtgtatcatatgccaagtccgccccctattgacgtcaatgacggtaaatggcccgcctggcattatgcccagtacatgaccttacgggactttcctacttggcagtacatctacgtattagtcatcgctattaccatggtgatgcggttttggcagtacaccaatgggcgtggatagcggtttgactcacggggatttccaagtctccaccccattgacgtcaatgggagtttgttttggcaccaaaatcaacgggactttccaaaatgtcgtaataaccccgccccgttgacgcaaatgggcggtaggcgtgtacggtgggaggtctatataagcagagctcgtttagtgaaccgtc

SEQ ID NO: 18733 - DNA, 487 bp, synthetic construct
  source 1..487: mol_type = other DNA
ccgcccaacgacccccgcccattgacgtcaataatgacgtatgttcccatagtaacgccaatagggactttccattgacgtcaatgggtggagtatttacggtaaactgcccacttggcagtacatcaagtgtatcatatgccaagtccgccccctattgacgtcaatgacggtaaatggcccgcctggcattatgcccagtacatgaccttacgggactttcctacttggcagtacatctacgtattagtcatcgctattaccatggtgatgcggttttggcagtacaccaatgggcgtggatagcggtttgactcacggggatttccaagtctccaccccattgacgtcaatgggagtttgttttggcaccaaaatcaacgggactttccaaaatgtcgtaataaccccgccccgttgacgcaaatgggcggtaggcgtgtacggtgggaggtctatataagcagagctcgtttagtgaaccgtc

SEQ ID NO: 18734 - DNA, 486 bp, synthetic construct
  source 1..486: mol_type = other DNA
cgcccaacgacccccgcccattgacgtcaataatgacgtatgttcccatagtaacgccaatagggactttccattgacgtcaatgggtggagtatttacggtaaactgcccacttggcagtacatcaagtgtatcatatgccaagtccgccccctattgacgtcaatgacggtaaatggcccgcctggcattatgcccagtacatgaccttacgggactttcctacttggcagtacatctacgtattagtcatcgctattaccatggtgatgcggttttggcagtacaccaatgggcgtggatagcggtttgactcacggggatttccaagtctccaccccattgacgtcaatgggagtttgttttggcaccaaaatcaacgggactttccaaaatgtcgtaataaccccgccccgttgacgcaaatgggcggtaggcgtgtacggtgggaggtctatataagcagagctcgtttagtgaaccgtc

SEQ ID NO: 18735 - DNA, 485 bp, synthetic construct
  source 1..485: mol_type = other DNA
gcccaacgacccccgcccattgacgtcaataatgacgtatgttcccatagtaacgccaatagggactttccattgacgtcaatgggtggagtatttacggtaaactgcccacttggcagtacatcaagtgtatcatatgccaagtccgccccctattgacgtcaatgacggtaaatggcccgcctggcattatgcccagtacatgaccttacgggactttcctacttggcagtacatctacgtattagtcatcgctattaccatggtgatgcggttttggcagtacaccaatgggcgtggatagcggtttgactcacggggatttccaagtctccaccccattgacgtcaatgggagtttgttttggcaccaaaatcaacgggactttccaaaatgtcgtaataaccccgccccgttgacgcaaatgggcggtaggcgtgtacggtgggaggtctatataagcagagctcgtttagtgaaccgtc

SEQ ID NO: 18736 - DNA, 484 bp, synthetic construct
  source 1..484: mol_type = other DNA
cccaacgacccccgcccattgacgtcaataatgacgtatgttcccatagtaacgccaatagggactttccattgacgtcaatgggtggagtatttacggtaaactgcccacttggcagtacatcaagtgtatcatatgccaagtccgccccctattgacgtcaatgacggtaaatggcccgcctggcattatgcccagtacatgaccttacgggactttcctacttggcagtacatctacgtattagtcatcgctattaccatggtgatgcggttttggcagtacaccaatgggcgtggatagcggtttgactcacggggatttccaagtctccaccccattgacgtcaatgggagtttgttttggcaccaaaatcaacgggactttccaaaatgtcgtaataaccccgccccgttgacgcaaatgggcggtaggcgtgtacggtgggaggtctatataagcagagctcgtttagtgaaccgtc

SEQ ID NO: 18737 - DNA, 483 bp, synthetic construct
  source 1..483: mol_type = other DNA
ccaacgacccccgcccattgacgtcaataatgacgtatgttcccatagtaacgccaatagggactttccattgacgtcaatgggtggagtatttacggtaaactgcccacttggcagtacatcaagtgtatcatatgccaagtccgccccctattgacgtcaatgacggtaaatggcccgcctggcattatgcccagtacatgaccttacgggactttcctacttggcagtacatctacgtattagtcatcgctattaccatggtgatgcggttttggcagtacaccaatgggcgtggatagcggtttgactcacggggatttccaagtctccaccccattgacgtcaatgggagtttgttttggcaccaaaatcaacgggactttccaaaatgtcgtaataaccccgccccgttgacgcaaatgggcggtaggcgtgtacggtgggaggtctatataagcagagctcgtttagtgaaccgtc

SEQ ID NO: 18738 - DNA, 482 bp, synthetic construct
  source 1..482: mol_type = other DNA
caacgacccccgcccattgacgtcaataatgacgtatgttcccatagtaacgccaatagggactttccattgacgtcaatgggtggagtatttacggtaaactgcccacttggcagtacatcaagtgtatcatatgccaagtccgccccctattgacgtcaatgacggtaaatggcccgcctggcattatgcccagtacatgaccttacgggactttcctacttggcagtacatctacgtattagtcatcgctattaccatggtgatgcggttttggcagtacaccaatgggcgtggatagcggtttgactcacggggatttccaagtctccaccccattgacgtcaatgggagtttgttttggcaccaaaatcaacgggactttccaaaatgtcgtaataaccccgccccgttgacgcaaatgggcggtaggcgtgtacggtgggaggtctatataagcagagctcgtttagtgaaccgtc

SEQ ID NO: 18739 - DNA, 481 bp, synthetic construct
  source 1..481: mol_type = other DNA
aacgacccccgcccattgacgtcaataatgacgtatgttcccatagtaacgccaatagggactttccattgacgtcaatgggtggagtatttacggtaaactgcccacttggcagtacatcaagtgtatcatatgccaagtccgccccctattgacgtcaatgacggtaaatggcccgcctggcattatgcccagtacatgaccttacgggactttcctacttggcagtacatctacgtattagtcatcgctattaccatggtgatgcggttttggcagtacaccaatgggcgtggatagcggtttgactcacggggatttccaagtctccaccccattgacgtcaatgggagtttgttttggcaccaaaatcaacgggactttccaaaatgtcgtaataaccccgccccgttgacgcaaatgggcggtaggcgtgtacggtgggaggtctatataagcagagctcgtttagtgaaccgtc

SEQ ID NO: 18740 - DNA, 480 bp, synthetic construct
  source 1..480: mol_type = other DNA
acgacccccgcccattgacgtcaataatgacgtatgttcccatagtaacgccaatagggactttccattgacgtcaatgggtggagtatttacggtaaactgcccacttggcagtacatcaagtgtatcatatgccaagtccgccccctattgacgtcaatgacggtaaatggcccgcctggcattatgcccagtacatgaccttacgggactttcctacttggcagtacatctacgtattagtcatcgctattaccatggtgatgcggttttggcagtacaccaatgggcgtggatagcggtttgactcacggggatttccaagtctccaccccattgacgtcaatgggagtttgttttggcaccaaaatcaacgggactttccaaaatgtcgtaataaccccgccccgttgacgcaaatgggcggtaggcgtgtacggtgggaggtctatataagcagagctcgtttagtgaaccgtc

SEQ ID NO: 18741 - DNA, 479 bp, synthetic construct
  source 1..479: mol_type = other DNA
cgacccccgcccattgacgtcaataatgacgtatgttcccatagtaacgccaatagggactttccattgacgtcaatgggtggagtatttacggtaaactgcccacttggcagtacatcaagtgtatcatatgccaagtccgccccctattgacgtcaatgacggtaaatggcccgcctggcattatgcccagtacatgaccttacgggactttcctacttggcagtacatctacgtattagtcatcgctattaccatggtgatgcggttttggcagtacaccaatgggcgtggatagcggtttgactcacggggatttccaagtctccaccccattgacgtcaatgggagtttgttttggcaccaaaatcaacgggactttccaaaatgtcgtaataaccccgccccgttgacgcaaatgggcggtaggcgtgtacggtgggaggtctatataagcagagctcgtttagtgaaccgtc

SEQ ID NO: 18742 - DNA, 478 bp, synthetic construct
  source 1..478: mol_type = other DNA
gacccccgcccattgacgtcaataatgacgtatgttcccatagtaacgccaatagggactttccattgacgtcaatgggtggagtatttacggtaaactgcccacttggcagtacatcaagtgtatcatatgccaagtccgccccctattgacgtcaatgacggtaaatggcccgcctggcattatgcccagtacatgaccttacgggactttcctacttggcagtacatctacgtattagtcatcgctattaccatggtgatgcggttttggcagtacaccaatgggcgtggatagcggtttgactcacggggatttccaagtctccaccccattgacgtcaatgggagtttgttttggcaccaaaatcaacgggactttccaaaatgtcgtaataaccccgccccgttgacgcaaatgggcggtaggcgtgtacggtgggaggtctatataagcagagctcgtttagtgaaccgtc

SEQ ID NO: 18743 - DNA, 477 bp, synthetic construct
  source 1..477: mol_type = other DNA
acccccgcccattgacgtcaataatgacgtatgttcccatagtaacgccaatagggactttccattgacgtcaatgggtggagtatttacggtaaactgcccacttggcagtacatcaagtgtatcatatgccaagtccgccccctattgacgtcaatgacggtaaatggcccgcctggcattatgcccagtacatgaccttacgggactttcctacttggcagtacatctacgtattagtcatcgctattaccatggtgatgcggttttggcagtacaccaatgggcgtggatagcggtttgactcacggggatttccaagtctccaccccattgacgtcaatgggagtttgttttggcaccaaaatcaacgggactttccaaaatgtcgtaataaccccgccccgttgacgcaaatgggcggtaggcgtgtacggtgggaggtctatataagcagagctcgtttagtgaaccgtc

SEQ ID NO: 18744 - DNA, 476 bp, synthetic construct
  source 1..476: mol_type = other DNA
cccccgcccattgacgtcaataatgacgtatgttcccatagtaacgccaatagggactttccattgacgtcaatgggtggagtatttacggtaaactgcccacttggcagtacatcaagtgtatcatatgccaagtccgccccctattgacgtcaatgacggtaaatggcccgcctggcattatgcccagtacatgaccttacgggactttcctacttggcagtacatctacgtattagtcatcgctattaccatggtgatgcggttttggcagtacaccaatgggcgtggatagcggtttgactcacggggatttccaagtctccaccccattgacgtcaatgggagtttgttttggcaccaaaatcaacgggactttccaaaatgtcgtaataaccccgccccgttgacgcaaatgggcggtaggcgtgtacggtgggaggtctatataagcagagctcgtttagtgaaccgtc

SEQ ID NO: 18745 - DNA, 475 bp, synthetic construct
  source 1..475: mol_type = other DNA
ccccgcccattgacgtcaataatgacgtatgttcccatagtaacgccaatagggactttccattgacgtcaatgggtggagtatttacggtaaactgcccacttggcagtacatcaagtgtatcatatgccaagtccgccccctattgacgtcaatgacggtaaatggcccgcctggcattatgcccagtacatgaccttacgggactttcctacttggcagtacatctacgtattagtcatcgctattaccatggtgatgcggttttggcagtacaccaatgggcgtggatagcggtttgactcacggggatttccaagtctccaccccattgacgtcaatgggagtttgttttggcaccaaaatcaacgggactttccaaaatgtcgtaataaccccgccccgttgacgcaaatgggcggtaggcgtgtacggtgggaggtctatataagcagagctcgtttagtgaaccgtc

SEQ ID NO: 18746 - DNA, 474 bp, synthetic construct
  source 1..474: mol_type = other DNA
cccgcccattgacgtcaataatgacgtatgttcccatagtaacgccaatagggactttccattgacgtcaatgggtggagtatttacggtaaactgcccacttggcagtacatcaagtgtatcatatgccaagtccgccccctattgacgtcaatgacggtaaatggcccgcctggcattatgcccagtacatgaccttacgggactttcctacttggcagtacatctacgtattagtcatcgctattaccatggtgatgcggttttggcagtacaccaatgggcgtggatagcggtttgactcacggggatttccaagtctccaccccattgacgtcaatgggagtttgttttggcaccaaaatcaacgggactttccaaaatgtcgtaataaccccgccccgttgacgcaaatgggcggtaggcgtgtacggtgggaggtctatataagcagagctcgtttagtgaaccgtc

SEQ ID NO: 18747 - DNA, 473 bp, synthetic construct
  source 1..473: mol_type = other DNA
ccgcccattgacgtcaataatgacgtatgttcccatagtaacgccaatagggactttccattgacgtcaatgggtggagtatttacggtaaactgcccacttggcagtacatcaagtgtatcatatgccaagtccgccccctattgacgtcaatgacggtaaatggcccgcctggcattatgcccagtacatgaccttacgggactttcctacttggcagtacatctacgtattagtcatcgctattaccatggtgatgcggttttggcagtacaccaatgggcgtggatagcggtttgactcacggggatttccaagtctccaccccattgacgtcaatgggagtttgttttggcaccaaaatcaacgggactttccaaaatgtcgtaataaccccgccccgttgacgcaaatgggcggtaggcgtgtacggtgggaggtctatataagcagagctcgtttagtgaaccgtc

SEQ ID NO: 18748 - DNA, 472 bp, synthetic construct
  source 1..472: mol_type = other DNA
cgcccattgacgtcaataatgacgtatgttcccatagtaacgccaatagggactttccattgacgtcaatgggtggagtatttacggtaaactgcccacttggcagtacatcaagtgtatcatatgccaagtccgccccctattgacgtcaatgacggtaaatggcccgcctggcattatgcccagtacatgaccttacgggactttcctacttggcagtacatctacgtattagtcatcgctattaccatggtgatgcggttttggcagtacaccaatgggcgtggatagcggtttgactcacggggatttccaagtctccaccccattgacgtcaatgggagtttgttttggcaccaaaatcaacgggactttccaaaatgtcgtaataaccccgccccgttgacgcaaatgggcggtaggcgtgtacggtgggaggtctatataagcagagctcgtttagtgaaccgtc

SEQ ID NO: 18749 - DNA, 471 bp, synthetic construct
  source 1..471: mol_type = other DNA
gcccattgacgtcaataatgacgtatgttcccatagtaacgccaatagggactttccattgacgtcaatgggtggagtatttacggtaaactgcccacttggcagtacatcaagtgtatcatatgccaagtccgccccctattgacgtcaatgacggtaaatggcccgcctggcattatgcccagtacatgaccttacgggactttcctacttggcagtacatctacgtattagtcatcgctattaccatggtgatgcggttttggcagtacaccaatgggcgtggatagcggtttgactcacggggatttccaagtctccaccccattgacgtcaatgggagtttgttttggcaccaaaatcaacgggactttccaaaatgtcgtaataaccccgccccgttgacgcaaatgggcggtaggcgtgtacggtgggaggtctatataagcagagctcgtttagtgaaccgtc

SEQ ID NO: 18750 - DNA, 470 bp, synthetic construct
  source 1..470: mol_type = other DNA
cccattgacgtcaataatgacgtatgttcccatagtaacgccaatagggactttccattgacgtcaatgggtggagtatttacggtaaactgcccacttggcagtacatcaagtgtatcatatgccaagtccgccccctattgacgtcaatgacggtaaatggcccgcctggcattatgcccagtacatgaccttacgggactttcctacttggcagtacatctacgtattagtcatcgctattaccatggtgatgcggttttggcagtacaccaatgggcgtggatagcggtttgactcacggggatttccaagtctccaccccattgacgtcaatgggagtttgttttggcaccaaaatcaacgggactttccaaaatgtcgtaataaccccgccccgttgacgcaaatgggcggtaggcgtgtacggtgggaggtctatataagcagagctcgtttagtgaaccgtc

SEQ ID NO: 18751 - DNA, 469 bp, synthetic construct
  source 1..469: mol_type = other DNA
ccattgacgtcaataatgacgtatgttcccatagtaacgccaatagggactttccattgacgtcaatgggtggagtatttacggtaaactgcccacttggcagtacatcaagtgtatcatatgccaagtccgccccctattgacgtcaatgacggtaaatggcccgcctggcattatgcccagtacatgaccttacgggactttcctacttggcagtacatctacgtattagtcatcgctattaccatggtgatgcggttttggcagtacaccaatgggcgtggatagcggtttgactcacggggatttccaagtctccaccccattgacgtcaatgggagtttgttttggcaccaaaatcaacgggactttccaaaatgtcgtaataaccccgccccgttgacgcaaatgggcggtaggcgtgtacggtgggaggtctatataagcagagctcgtttagtgaaccgtc

SEQ ID NO: 18752 - DNA, 468 bp, synthetic construct
  source 1..468: mol_type = other DNA
cattgacgtcaataatgacgtatgttcccatagtaacgccaatagggactttccattgacgtcaatgggtggagtatttacggtaaactgcccacttggcagtacatcaagtgtatcatatgccaagtccgccccctattgacgtcaatgacggtaaatggcccgcctggcattatgcccagtacatgaccttacgggactttcctacttggcagtacatctacgtattagtcatcgctattaccatggtgatgcggttttggcagtacaccaatgggcgtggatagcggtttgactcacggggatttccaagtctccaccccattgacgtcaatgggagtttgttttggcaccaaaatcaacgggactttccaaaatgtcgtaataaccccgccccgttgacgcaaatgggcggtaggcgtgtacggtgggaggtctatataagcagagctcgtttagtgaaccgtc

SEQ ID NO: 18753 - DNA, 467 bp, synthetic construct
  source 1..467: mol_type = other DNA
attgacgtcaataatgacgtatgttcccatagtaacgccaatagggactttccattgacgtcaatgggtggagtatttacggtaaactgcccacttggcagtacatcaagtgtatcatatgccaagtccgccccctattgacgtcaatgacggtaaatggcccgcctggcattatgcccagtacatgaccttacgggactttcctacttggcagtacatctacgtattagtcatcgctattaccatggtgatgcggttttggcagtacaccaatgggcgtggatagcggtttgactcacggggatttccaagtctccaccccattgacgtcaatgggagtttgttttggcaccaaaatcaacgggactttccaaaatgtcgtaataaccccgccccgttgacgcaaatgggcggtaggcgtgtacggtgggaggtctatataagcagagctcgtttagtgaaccgtc

SEQ ID NO: 18754 - DNA, 466 bp, synthetic construct
  source 1..466: mol_type = other DNA
ttgacgtcaataatgacgtatgttcccatagtaacgccaatagggactttccattgacgtcaatgggtggagtatttacggtaaactgcccacttggcagtacatcaagtgtatcatatgccaagtccgccccctattgacgtcaatgacggtaaatggcccgcctggcattatgcccagtacatgaccttacgggactttcctacttggcagtacatctacgtattagtcatcgctattaccatggtgatgcggttttggcagtacaccaatgggcgtggatagcggtttgactcacggggatttccaagtctccaccccattgacgtcaatgggagtttgttttggcaccaaaatcaacgggactttccaaaatgtcgtaataaccccgccccgttgacgcaaatgggcggtaggcgtgtacggtgggaggtctatataagcagagctcgtttagtgaaccgtc

SEQ ID NO: 18755 - DNA, 465 bp, synthetic construct
  source 1..465: mol_type = other DNA
tgacgtcaataatgacgtatgttcccatagtaacgccaatagggactttccattgacgtcaatgggtggagtatttacggtaaactgcccacttggcagtacatcaagtgtatcatatgccaagtccgccccctattgacgtcaatgacggtaaatggcccgcctggcattatgcccagtacatgaccttacgggactttcctacttggcagtacatctacgtattagtcatcgctattaccatggtgatgcggttttggcagtacaccaatgggcgtggatagcggtttgactcacggggatttccaagtctccaccccattgacgtcaatgggagtttgttttggcaccaaaatcaacgggactttccaaaatgtcgtaataaccccgccccgttgacgcaaatgggcggtaggcgtgtacggtgggaggtctatataagcagagctcgtttagtgaaccgtc

SEQ ID NO: 18756 - DNA, 464 bp, synthetic construct
  source 1..464: mol_type = other DNA
gacgtcaataatgacgtatgttcccatagtaacgccaatagggactttccattgacgtcaatgggtggagtatttacggtaaactgcccacttggcagtacatcaagtgtatcatatgccaagtccgccccctattgacgtcaatgacggtaaatggcccgcctggcattatgcccagtacatgaccttacgggactttcctacttggcagtacatctacgtattagtcatcgctattaccatggtgatgcggttttggcagtacaccaatgggcgtggatagcggtttgactcacggggatttccaagtctccaccccattgacgtcaatgggagtttgttttggcaccaaaatcaacgggactttccaaaatgtcgtaataaccccgccccgttgacgcaaatgggcggtaggcgtgtacggtgggaggtctatataagcagagctcgtttagtgaaccgtc

SEQ ID NO: 18757 - DNA, 463 bp, synthetic construct
  source 1..463: mol_type = other DNA
acgtcaataatgacgtatgttcccatagtaacgccaatagggactttccattgacgtcaatgggtggagtatttacggtaaactgcccacttggcagtacatcaagtgtatcatatgccaagtccgccccctattgacgtcaatgacggtaaatggcccgcctggcattatgcccagtacatgaccttacgggactttcctacttggcagtacatctacgtattagtcatcgctattaccatggtgatgcggttttggcagtacaccaatgggcgtggatagcggtttgactcacggggatttccaagtctccaccccattgacgtcaatgggagtttgttttggcaccaaaatcaacgggactttccaaaatgtcgtaataaccccgccccgttgacgcaaatgggcggtaggcgtgtacggtgggaggtctatataagcagagctcgtttagtgaaccgtc

SEQ ID NO: 18758 - DNA, 462 bp, synthetic construct
  source 1..462: mol_type = other DNA
cgtcaataatgacgtatgttcccatagtaacgccaatagggactttccattgacgtcaatgggtggagtatttacggtaaactgcccacttggcagtacatcaagtgtatcatatgccaagtccgccccctattgacgtcaatgacggtaaatggcccgcctggcattatgcccagtacatgaccttacgggactttcctacttggcagtacatctacgtattagtcatcgctattaccatggtgatgcggttttggcagtacaccaatgggcgtggatagcggtttgactcacggggatttccaagtctccaccccattgacgtcaatgggagtttgttttggcaccaaaatcaacgggactttccaaaatgtcgtaataaccccgccccgttgacgcaaatgggcggtaggcgtgtacggtgggaggtctatataagcagagctcgtttagtgaaccgtc

SEQ ID NO: 18759 - DNA, 461 bp, synthetic construct
  source 1..461: mol_type = other DNA
gtcaataatgacgtatgttcccatagtaacgccaatagggactttccattgacgtcaatgggtggagtatttacggtaaactgcccacttggcagtacatcaagtgtatcatatgccaagtccgccccctattgacgtcaatgacggtaaatggcccgcctggcattatgcccagtacatgaccttacgggactttcctacttggcagtacatctacgtattagtcatcgctattaccatggtgatgcggttttggcagtacaccaatgggcgtggatagcggtttgactcacggggatttccaagtctccaccccattgacgtcaatgggagtttgttttggcaccaaaatcaacgggactttccaaaatgtcgtaataaccccgccccgttgacgcaaatgggcggtaggcgtgtacggtgggaggtctatataagcagagctcgtttagtgaaccgtc

SEQ ID NO: 18760 - DNA, 460 bp, synthetic construct
  source 1..460: mol_type = other DNA
tcaataatgacgtatgttcccatagtaacgccaatagggactttccattgacgtcaatgggtggagtatttacggtaaactgcccacttggcagtacatcaagtgtatcatatgccaagtccgccccctattgacgtcaatgacggtaaatggcccgcctggcattatgcccagtacatgaccttacgggactttcctacttggcagtacatctacgtattagtcatcgctattaccatggtgatgcggttttggcagtacaccaatgggcgtggatagcggtttgactcacggggatttccaagtctccaccccattgacgtcaatgggagtttgttttggcaccaaaatcaacgggactttccaaaatgtcgtaataaccccgccccgttgacgcaaatgggcggtaggcgtgtacggtgggaggtctatataagcagagctcgtttagtgaaccgtc

SEQ ID NO: 18761 - DNA, 459 bp, synthetic construct
  source 1..459: mol_type = other DNA
caataatgacgtatgttcccatagtaacgccaatagggactttccattgacgtcaatgggtggagtatttacggtaaactgcccacttggcagtacatcaagtgtatcatatgccaagtccgccccctattgacgtcaatgacggtaaatggcccgcctggcattatgcccagtacatgaccttacgggactttcctacttggcagtacatctacgtattagtcatcgctattaccatggtgatgcggttttggcagtacaccaatgggcgtggatagcggtttgactcacggggatttccaagtctccaccccattgacgtcaatgggagtttgttttggcaccaaaatcaacgggactttccaaaatgtcgtaataaccccgccccgttgacgcaaatgggcggtaggcgtgtacggtgggaggtctatataagcagagctcgtttagtgaaccgtc

SEQ ID NO: 18762 - DNA, 458 bp, synthetic construct
  source 1..458: mol_type = other DNA
aataatgacgtatgttcccatagtaacgccaatagggactttccattgacgtcaatgggtggagtatttacggtaaactgcccacttggcagtacatcaagtgtatcatatgccaagtccgccccctattgacgtcaatgacggtaaatggcccgcctggcattatgcccagtacatgaccttacgggactttcctacttggcagtacatctacgtattagtcatcgctattaccatggtgatgcggttttggcagtacaccaatgggcgtggatagcggtttgactcacggggatttccaagtctccaccccattgacgtcaatgggagtttgttttggcaccaaaatcaacgggactttccaaaatgtcgtaataaccccgccccgttgacgcaaatgggcggtaggcgtgtacggtgggaggtctatataagcagagctcgtttagtgaaccgtc

SEQ ID NO: 18763 - DNA, 457 bp, synthetic construct
  source 1..457: mol_type = other DNA
ataatgacgtatgttcccatagtaacgccaatagggactttccattgacgtcaatgggtggagtatttacggtaaactgcccacttggcagtacatcaagtgtatcatatgccaagtccgccccctattgacgtcaatgacggtaaatggcccgcctggcattatgcccagtacatgaccttacgggactttcctacttggcagtacatctacgtattagtcatcgctattaccatggtgatgcggttttggcagtacaccaatgggcgtggatagcggtttgactcacggggatttccaagtctccaccccattgacgtcaatgggagtttgttttggcaccaaaatcaacgggactttccaaaatgtcgtaataaccccgccccgttgacgcaaatgggcggtaggcgtgtacggtgggaggtctatataagcagagctcgtttagtgaaccgtc

SEQ ID NO: 18764 - DNA, 456 bp, synthetic construct
  source 1..456: mol_type = other DNA
taatgacgtatgttcccatagtaacgccaatagggactttccattgacgtcaatgggtggagtatttacggtaaactgcccacttggcagtacatcaagtgtatcatatgccaagtccgccccctattgacgtcaatgacggtaaatggcccgcctggcattatgcccagtacatgaccttacgggactttcctacttggcagtacatctacgtattagtcatcgctattaccatggtgatgcggttttggcagtacaccaatgggcgtggatagcggtttgactcacggggatttccaagtctccaccccattgacgtcaatgggagtttgttttggcaccaaaatcaacgggactttccaaaatgtcgtaataaccccgccccgttgacgcaaatgggcggtaggcgtgtacggtgggaggtctatataagcagagctcgtttagtgaaccgtc

SEQ ID NO: 18765 - DNA, 455 bp, synthetic construct
  source 1..455: mol_type = other DNA
aatgacgtatgttcccatagtaacgccaatagggactttccattgacgtcaatgggtggagtatttacggtaaactgcccacttggcagtacatcaagtgtatcatatgccaagtccgccccctattgacgtcaatgacggtaaatggcccgcctggcattatgcccagtacatgaccttacgggactttcctacttggcagtacatctacgtattagtcatcgctattaccatggtgatgcggttttggcagtacaccaatgggcgtggatagcggtttgactcacggggatttccaagtctccaccccattgacgtcaatgggagtttgttttggcaccaaaatcaacgggactttccaaaatgtcgtaataaccccgccccgttgacgcaaatgggcggtaggcgtgtacggtgggaggtctatataagcagagctcgtttagtgaaccgtc

SEQ ID NO: 18766 - DNA, 454 bp, synthetic construct
  source 1..454: mol_type = other DNA
atgacgtatgttcccatagtaacgccaatagggactttccattgacgtcaatgggtggagtatttacggtaaactgcccacttggcagtacatcaagtgtatcatatgccaagtccgccccctattgacgtcaatgacggtaaatggcccgcctggcattatgcccagtacatgaccttacgggactttcctacttggcagtacatctacgtattagtcatcgctattaccatggtgatgcggttttggcagtacaccaatgggcgtggatagcggtttgactcacggggatttccaagtctccaccccattgacgtcaatgggagtttgttttggcaccaaaatcaacgggactttccaaaatgtcgtaataaccccgccccgttgacgcaaatgggcggtaggcgtgtacggtgggaggtctatataagcagagctcgtttagtgaaccgtc

SEQ ID NO: 18767 - DNA, 453 bp, synthetic construct
  source 1..453: mol_type = other DNA
tgacgtatgttcccatagtaacgccaatagggactttccattgacgtcaatgggtggagtatttacggtaaactgcccacttggcagtacatcaagtgtatcatatgccaagtccgccccctattgacgtcaatgacggtaaatggcccgcctggcattatgcccagtacatgaccttacgggactttcctacttggcagtacatctacgtattagtcatcgctattaccatggtgatgcggttttggcagtacaccaatgggcgtggatagcggtttgactcacggggatttccaagtctccaccccattgacgtcaatgggagtttgttttggcaccaaaatcaacgggactttccaaaatgtcgtaataaccccgccccgttgacgcaaatgggcggtaggcgtgtacggtgggaggtctatataagcagagctcgtttagtgaaccgtc

SEQ ID NO: 18768 - DNA, 452 bp, synthetic construct
  source 1..452: mol_type = other DNA
gacgtatgttcccatagtaacgccaatagggactttccattgacgtcaatgggtggagtatttacggtaaactgcccacttggcagtacatcaagtgtatcatatgccaagtccgccccctattgacgtcaatgacggtaaatggcccgcctggcattatgcccagtacatgaccttacgggactttcctacttggcagtacatctacgtattagtcatcgctattaccatggtgatgcggttttggcagtacaccaatgggcgtggatagcggtttgactcacggggatttccaagtctccaccccattgacgtcaatgggagtttgttttggcaccaaaatcaacgggactttccaaaatgtcgtaataaccccgccccgttgacgcaaatgggcggtaggcgtgtacggtgggaggtctatataagcagagctcgtttagtgaaccgtc

SEQ ID NO: 18769 - DNA, 451 bp, synthetic construct
  source 1..451: mol_type = other DNA
acgtatgttcccatagtaacgccaatagggactttccattgacgtcaatgggtggagtatttacggtaaactgcccacttggcagtacatcaagtgtatcatatgccaagtccgccccctattgacgtcaatgacggtaaatggcccgcctggcattatgcccagtacatgaccttacgggactttcctacttggcagtacatctacgtattagtcatcgctattaccatggtgatgcggttttggcagtacaccaatgggcgtggatagcggtttgactcacggggatttccaagtctccaccccattgacgtcaatgggagtttgttttggcaccaaaatcaacgggactttccaaaatgtcgtaataaccccgccccgttgacgcaaatgggcggtaggcgtgtacggtgggaggtctatataagcagagctcgtttagtgaaccgtc

SEQ ID NO: 18770 - DNA, 450 bp, synthetic construct
  source 1..450: mol_type = other DNA
cgtatgttcccatagtaacgccaatagggactttccattgacgtcaatgggtggagtatttacggtaaactgcccacttggcagtacatcaagtgtatcatatgccaagtccgccccctattgacgtcaatgacggtaaatggcccgcctggcattatgcccagtacatgaccttacgggactttcctacttggcagtacatctacgtattagtcatcgctattaccatggtgatgcggttttggcagtacaccaatgggcgtggatagcggtttgactcacggggatttccaagtctccaccccattgacgtcaatgggagtttgttttggcaccaaaatcaacgggactttccaaaatgtcgtaataaccccgccccgttgacgcaaatgggcggtaggcgtgtacggtgggaggtctatataagcagagctcgtttagtgaaccgtc

SEQ ID NO: 18771 - DNA, 449 bp, synthetic construct
  source 1..449: mol_type = other DNA
gtatgttcccatagtaacgccaatagggactttccattgacgtcaatgggtggagtatttacggtaaactgcccacttggcagtacatcaagtgtatcatatgccaagtccgccccctattgacgtcaatgacggtaaatggcccgcctggcattatgcccagtacatgaccttacgggactttcctacttggcagtacatctacgtattagtcatcgctattaccatggtgatgcggttttggcagtacaccaatgggcgtggatagcggtttgactcacggggatttccaagtctccaccccattgacgtcaatgggagtttgttttggcaccaaaatcaacgggactttccaaaatgtcgtaataaccccgccccgttgacgcaaatgggcggtaggcgtgtacggtgggaggtctatataagcagagctcgtttagtgaaccgtc

SEQ ID NO: 18772 - DNA, 448 bp, synthetic construct
  source 1..448: mol_type = other DNA
tatgttcccatagtaacgccaatagggactttccattgacgtcaatgggtggagtatttacggtaaactgcccacttggcagtacatcaagtgtatcatatgccaagtccgccccctattgacgtcaatgacggtaaatggcccgcctggcattatgcccagtacatgaccttacgggactttcctacttggcagtacatctacgtattagtcatcgctattaccatggtgatgcggttttggcagtacaccaatgggcgtggatagcggtttgactcacggggatttccaagtctccaccccattgacgtcaatgggagtttgttttggcaccaaaatcaacgggactttccaaaatgtcgtaataaccccgccccgttgacgcaaatgggcggtaggcgtgtacggtgggaggtctatataagcagagctcgtttagtgaaccgtc

SEQ ID NO: 18773 - DNA, 447 bp, synthetic construct
  source 1..447: mol_type = other DNA
atgttcccatagtaacgccaatagggactttccattgacgtcaatgggtggagtatttacggtaaactgcccacttggcagtacatcaagtgtatcatatgccaagtccgccccctattgacgtcaatgacggtaaatggcccgcctggcattatgcccagtacatgaccttacgggactttcctacttggcagtacatctacgtattagtcatcgctattaccatggtgatgcggttttggcagtacaccaatgggcgtggatagcggtttgactcacggggatttccaagtctccaccccattgacgtcaatgggagtttgttttggcaccaaaatcaacgggactttccaaaatgtcgtaataaccccgccccgttgacgcaaatgggcggtaggcgtgtacggtgggaggtctatataagcagagctcgtttagtgaaccgtc

SEQ ID NO: 18774 - DNA, 446 bp, synthetic construct
  source 1..446: mol_type = other DNA
tgttcccatagtaacgccaatagggactttccattgacgtcaatgggtggagtatttacggtaaactgcccacttggcagtacatcaagtgtatcatatgccaagtccgccccctattgacgtcaatgacggtaaatggcccgcctggcattatgcccagtacatgaccttacgggactttcctacttggcagtacatctacgtattagtcatcgctattaccatggtgatgcggttttggcagtacaccaatgggcgtggatagcggtttgactcacggggatttccaagtctccaccccattgacgtcaatgggagtttgttttggcaccaaaatcaacgggactttccaaaatgtcgtaataaccccgccccgttgacgcaaatgggcggtaggcgtgtacggtgggaggtctatataagcagagctcgtttagtgaaccgtc

SEQ ID NO: 18775 - DNA, 445 bp, synthetic construct
  source 1..445: mol_type = other DNA
gttcccatagtaacgccaatagggactttccattgacgtcaatgggtggagtatttacggtaaactgcccacttggcagtacatcaagtgtatcatatgccaagtccgccccctattgacgtcaatgacggtaaatggcccgcctggcattatgcccagtacatgaccttacgggactttcctacttggcagtacatctacgtattagtcatcgctattaccatggtgatgcggttttggcagtacaccaatgggcgtggatagcggtttgactcacggggatttccaagtctccaccccattgacgtcaatgggagtttgttttggcaccaaaatcaacgggactttccaaaatgtcgtaataaccccgccccgttgacgcaaatgggcggtaggcgtgtacggtgggaggtctatataagcagagctcgtttagtgaaccgtc

SEQ ID NO: 18776 - DNA, 444 bp, synthetic construct
  source 1..444: mol_type = other DNA
ttcccatagtaacgccaatagggactttccattgacgtcaatgggtggagtatttacggtaaactgcccacttggcagtacatcaagtgtatcatatgccaagtccgccccctattgacgtcaatgacggtaaatggcccgcctggcattatgcccagtacatgaccttacgggactttcctacttggcagtacatctacgtattagtcatcgctattaccatggtgatgcggttttggcagtacaccaatgggcgtggatagcggtttgactcacggggatttccaagtctccaccccattgacgtcaatgggagtttgttttggcaccaaaatcaacgggactttccaaaatgtcgtaataaccccgccccgttgacgcaaatgggcggtaggcgtgtacggtgggaggtctatataagcagagctcgtttagtgaaccgtc

SEQ ID NO: 18777 - DNA, 443 bp, synthetic construct
  source 1..443: mol_type = other DNA
tcccatagtaacgccaatagggactttccattgacgtcaatgggtggagtatttacggtaaactgcccacttggcagtacatcaagtgtatcatatgccaagtccgccccctattgacgtcaatgacggtaaatggcccgcctggcattatgcccagtacatgaccttacgggactttcctacttggcagtacatctacgtattagtcatcgctattaccatggtgatgcggttttggcagtacaccaatgggcgtggatagcggtttgactcacggggatttccaagtctccaccccattgacgtcaatgggagtttgttttggcaccaaaatcaacgggactttccaaaatgtcgtaataaccccgccccgttgacgcaaatgggcggtaggcgtgtacggtgggaggtctatataagcagagctcgtttagtgaaccgtc

SEQ ID NO: 18778 - DNA, 442 bp, synthetic construct
  source 1..442: mol_type = other DNA
cccatagtaacgccaatagggactttccattgacgtcaatgggtggagtatttacggtaaactgcccacttggcagtacatcaagtgtatcatatgccaagtccgccccctattgacgtcaatgacggtaaatggcccgcctggcattatgcccagtacatgaccttacgggactttcctacttggcagtacatctacgtattagtcatcgctattaccatggtgatgcggttttggcagtacaccaatgggcgtggatagcggtttgactcacggggatttccaagtctccaccccattgacgtcaatgggagtttgttttggcaccaaaatcaacgggactttccaaaatgtcgtaataaccccgccccgttgacgcaaatgggcggtaggcgtgtacggtgggaggtctatataagcagagctcgtttagtgaaccgtc

SEQ ID NO: 18779 - DNA, 441 bp, synthetic construct
  source 1..441: mol_type = other DNA
ccatagtaacgccaatagggactttccattgacgtcaatgggtggagtatttacggtaaactgcccacttggcagtacatcaagtgtatcatatgccaagtccgccccctattgacgtcaatgacggtaaatggcccgcctggcattatgcccagtacatgaccttacgggactttcctacttggcagtacatctacgtattagtcatcgctattaccatggtgatgcggttttggcagtacaccaatgggcgtggatagcggtttgactcacggggatttccaagtctccaccccattgacgtcaatgggagtttgttttggcaccaaaatcaacgggactttccaaaatgtcgtaataaccccgccccgttgacgcaaatgggcggtaggcgtgtacggtgggaggtctatataagcagagctcgtttagtgaaccgtc

SEQ ID NO: 18780 - DNA, 440 bp, synthetic construct
  source 1..440: mol_type = other DNA
catagtaacgccaatagggactttccattgacgtcaatgggtggagtatttacggtaaactgcccacttggcagtacatcaagtgtatcatatgccaagtccgccccctattgacgtcaatgacggtaaatggcccgcctggcattatgcccagtacatgaccttacgggactttcctacttggcagtacatctacgtattagtcatcgctattaccatggtgatgcggttttggcagtacaccaatgggcgtggatagcggtttgactcacggggatttccaagtctccaccccattgacgtcaatgggagtttgttttggcaccaaaatcaacgggactttccaaaatgtcgtaataaccccgccccgttgacgcaaatgggcggtaggcgtgtacggtgggaggtctatataagcagagctcgtttagtgaaccgtc

SEQ ID NO: 18781 - DNA, 439 bp, synthetic construct
  source 1..439: mol_type = other DNA
atagtaacgccaatagggactttccattgacgtcaatgggtggagtatttacggtaaactgcccacttggcagtacatcaagtgtatcatatgccaagtccgccccctattgacgtcaatgacggtaaatggcccgcctggcattatgcccagtacatgaccttacgggactttcctacttggcagtacatctacgtattagtcatcgctattaccatggtgatgcggttttggcagtacaccaatgggcgtggatagcggtttgactcacggggatttccaagtctccaccccattgacgtcaatgggagtttgttttggcaccaaaatcaacgggactttccaaaatgtcgtaataaccccgccccgttgacgcaaatgggcggtaggcgtgtacggtgggaggtctatataagcagagctcgtttagtgaaccgtc

SEQ ID NO: 18782 - DNA, 438 bp, synthetic construct
  source 1..438: mol_type = other DNA
tagtaacgccaatagggactttccattgacgtcaatgggtggagtatttacggtaaactgcccacttggcagtacatcaagtgtatcatatgccaagtccgccccctattgacgtcaatgacggtaaatggcccgcctggcattatgcccagtacatgaccttacgggactttcctacttggcagtacatctacgtattagtcatcgctattaccatggtgatgcggttttggcagtacaccaatgggcgtggatagcggtttgactcacggggatttccaagtctccaccccattgacgtcaatgggagtttgttttggcaccaaaatcaacgggactttccaaaatgtcgtaataaccccgccccgttgacgcaaatgggcggtaggcgtgtacggtgggaggtctatataagcagagctcgtttagtgaaccgtc

SEQ ID NO: 18783 - DNA, 437 bp, synthetic construct
  source 1..437: mol_type = other DNA
agtaacgccaatagggactttccattgacgtcaatgggtggagtatttacggtaaactgcccacttggcagtacatcaagtgtatcatatgccaagtccgccccctattgacgtcaatgacggtaaatggcccgcctggcattatgcccagtacatgaccttacgggactttcctacttggcagtacatctacgtattagtcatcgctattaccatggtgatgcggttttggcagtacaccaatgggcgtggatagcggtttgactcacggggatttccaagtctccaccccattgacgtcaatgggagtttgttttggcaccaaaatcaacgggactttccaaaatgtcgtaataaccccgccccgttgacgcaaatgggcggtaggcgtgtacggtgggaggtctatataagcagagctcgtttagtgaaccgtc

SEQ ID NO: 18784 - DNA, 436 bp, synthetic construct
  source 1..436: mol_type = other DNA
gtaacgccaatagggactttccattgacgtcaatgggtggagtatttacggtaaactgcccacttggcagtacatcaagtgtatcatatgccaagtccgccccctattgacgtcaatgacggtaaatggcccgcctggcattatgcccagtacatgaccttacgggactttcctacttggcagtacatctacgtattagtcatcgctattaccatggtgatgcggttttggcagtacaccaatgggcgtggatagcggtttgactcacggggatttccaagtctccaccccattgacgtcaatgggagtttgttttggcaccaaaatcaacgggactttccaaaatgtcgtaataaccccgccccgttgacgcaaatgggcggtaggcgtgtacggtgggaggtctatataagcagagctcgtttagtgaaccgtc

SEQ ID NO: 18785 - DNA, 435 bp, synthetic construct
  source 1..435: mol_type = other DNA
taacgccaatagggactttccattgacgtcaatgggtggagtatttacggtaaactgcccacttggcagtacatcaagtgtatcatatgccaagtccgccccctattgacgtcaatgacggtaaatggcccgcctggcattatgcccagtacatgaccttacgggactttcctacttggcagtacatctacgtattagtcatcgctattaccatggtgatgcggttttggcagtacaccaatgggcgtggatagcggtttgactcacggggatttccaagtctccaccccattgacgtcaatgggagtttgttttggcaccaaaatcaacgggactttccaaaatgtcgtaataaccccgccccgttgacgcaaatgggcggtaggcgtgtacggtgggaggtctatataagcagagctcgtttagtgaaccgtc

SEQ ID NO: 18786 - DNA, 434 bp, synthetic construct
  source 1..434: mol_type = other DNA
aacgccaatagggactttccattgacgtcaatgggtggagtatttacggtaaactgcccacttggcagtacatcaagtgtatcatatgccaagtccgccccctattgacgtcaatgacggtaaatggcccgcctggcattatgcccagtacatgaccttacgggactttcctacttggcagtacatctacgtattagtcatcgctattaccatggtgatgcggttttggcagtacaccaatgggcgtggatagcggtttgactcacggggatttccaagtctccaccccattgacgtcaatgggagtttgttttggcaccaaaatcaacgggactttccaaaatgtcgtaataaccccgccccgttgacgcaaatgggcggtaggcgtgtacggtgggaggtctatataagcagagctcgtttagtgaaccgtc

SEQ ID NO: 18787 - DNA, 433 bp, synthetic construct
  source 1..433: mol_type = other DNA
acgccaatagggactttccattgacgtcaatgggtggagtatttacggtaaactgcccacttggcagtacatcaagtgtatcatatgccaagtccgccccctattgacgtcaatgacggtaaatggcccgcctggcattatgcccagtacatgaccttacgggactttcctacttggcagtacatctacgtattagtcatcgctattaccatggtgatgcggttttggcagtacaccaatgggcgtggatagcggtttgactcacggggatttccaagtctccaccccattgacgtcaatgggagtttgttttggcaccaaaatcaacgggactttccaaaatgtcgtaataaccccgccccgttgacgcaaatgggcggtaggcgtgtacggtgggaggtctatataagcagagctcgtttagtgaaccgtc

SEQ ID NO: 18788 - DNA, 432 bp, synthetic construct
  source 1..432: mol_type = other DNA
cgccaatagggactttccattgacgtcaatgggtggagtatttacggtaaactgcccacttggcagtacatcaagtgtatcatatgccaagtccgccccctattgacgtcaatgacggtaaatggcccgcctggcattatgcccagtacatgaccttacgggactttcctacttggcagtacatctacgtattagtcatcgctattaccatggtgatgcggttttggcagtacaccaatgggcgtggatagcggtttgactcacggggatttccaagtctccaccccattgacgtcaatgggagtttgttttggcaccaaaatcaacgggactttccaaaatgtcgtaataaccccgccccgttgacgcaaatgggcggtaggcgtgtacggtgggaggtctatataagcagagctcgtttagtgaaccgtc

SEQ ID NO: 18789 - DNA, 431 bp, synthetic construct
  source 1..431: mol_type = other DNA
gccaatagggactttccattgacgtcaatgggtggagtatttacggtaaactgcccacttggcagtacatcaagtgtatcatatgccaagtccgccccctattgacgtcaatgacggtaaatggcccgcctggcattatgcccagtacatgaccttacgggactttcctacttggcagtacatctacgtattagtcatcgctattaccatggtgatgcggttttggcagtacaccaatgggcgtggatagcggtttgactcacggggatttccaagtctccaccccattgacgtcaatgggagtttgttttggcaccaaaatcaacgggactttccaaaatgtcgtaataaccccgccccgttgacgcaaatgggcggtaggcgtgtacggtgggaggtctatataagcagagctcgtttagtgaaccgtc

SEQ ID NO: 18790 - DNA, 430 bp, synthetic construct
  source 1..430: mol_type = other DNA
ccaatagggactttccattgacgtcaatgggtggagtatttacggtaaactgcccacttggcagtacatcaagtgtatcatatgccaagtccgccccctattgacgtcaatgacggtaaatggcccgcctggcattatgcccagtacatgaccttacgggactttcctacttggcagtacatctacgtattagtcatcgctattaccatggtgatgcggttttggcagtacaccaatgggcgtggatagcggtttgactcacggggatttccaagtctccaccccattgacgtcaatgggagtttgttttggcaccaaaatcaacgggactttccaaaatgtcgtaataaccccgccccgttgacgcaaatgggcggtaggcgtgtacggtgggaggtctatataagcagagctcgtttagtgaaccgtc

SEQ ID NO: 18791 - DNA, 429 bp, synthetic construct
  source 1..429: mol_type = other DNA
caatagggactttccattgacgtcaatgggtggagtatttacggtaaactgcccacttggcagtacatcaagtgtatcatatgccaagtccgccccctattgacgtcaatgacggtaaatggcccgcctggcattatgcccagtacatgaccttacgggactttcctacttggcagtacatctacgtattagtcatcgctattaccatggtgatgcggttttggcagtacaccaatgggcgtggatagcggtttgactcacggggatttccaagtctccaccccattgacgtcaatgggagtttgttttggcaccaaaatcaacgggactttccaaaatgtcgtaataaccccgccccgttgacgcaaatgggcggtaggcgtgtacggtgggaggtctatataagcagagctcgtttagtgaaccgtc

SEQ ID NO: 18792 - DNA, 428 bp, synthetic construct
  source 1..428: mol_type = other DNA
aatagggactttccattgacgtcaatgggtggagtatttacggtaaactgcccacttggcagtacatcaagtgtatcatatgccaagtccgccccctattgacgtcaatgacggtaaatggcccgcctggcattatgcccagtacatgaccttacgggactttcctacttggcagtacatctacgtattagtcatcgctattaccatggtgatgcggttttggcagtacaccaatgggcgtggatagcggtttgactcacggggatttccaagtctccaccccattgacgtcaatgggagtttgttttggcaccaaaatcaacgggactttccaaaatgtcgtaataaccccgccccgttgacgcaaatgggcggtaggcgtgtacggtgggaggtctatataagcagagctcgtttagtgaaccgtc

SEQ ID NO: 18793 - DNA, 427 bp, synthetic construct
  source 1..427: mol_type = other DNA
atagggactttccattgacgtcaatgggtggagtatttacggtaaactgcccacttggcagtacatcaagtgtatcatatgccaagtccgccccctattgacgtcaatgacggtaaatggcccgcctggcattatgcccagtacatgaccttacgggactttcctacttggcagtacatctacgtattagtcatcgctattaccatggtgatgcggttttggcagtacaccaatgggcgtggatagcggtttgactcacggggatttccaagtctccaccccattgacgtcaatgggagtttgttttggcaccaaaatcaacgggactttccaaaatgtcgtaataaccccgccccgttgacgcaaatgggcggtaggcgtgtacggtgggaggtctatataagcagagctcgtttagtgaaccgtc

SEQ ID NO: 18794 - DNA, 426 bp, synthetic construct
  source 1..426: mol_type = other DNA
tagggactttccattgacgtcaatgggtggagtatttacggtaaactgcccacttggcagtacatcaagtgtatcatatgccaagtccgccccctattgacgtcaatgacggtaaatggcccgcctggcattatgcccagtacatgaccttacgggactttcctacttggcagtacatctacgtattagtcatcgctattaccatggtgatgcggttttggcagtacaccaatgggcgtggatagcggtttgactcacggggatttccaagtctccaccccattgacgtcaatgggagtttgttttggcaccaaaatcaacgggactttccaaaatgtcgtaataaccccgccccgttgacgcaaatgggcggtaggcgtgtacggtgggaggtctatataagcagagctcgtttagtgaaccgtc

SEQ ID NO: 18795 - DNA, 425 bp, synthetic construct
  source 1..425: mol_type = other DNA
agggactttccattgacgtcaatgggtggagtatttacggtaaactgcccacttggcagtacatcaagtgtatcatatgccaagtccgccccctattgacgtcaatgacggtaaatggcccgcctggcattatgcccagtacatgaccttacgggactttcctacttggcagtacatctacgtattagtcatcgctattaccatggtgatgcggttttggcagtacaccaatgggcgtggatagcggtttgactcacggggatttccaagtctccaccccattgacgtcaatgggagtttgttttggcaccaaaatcaacgggactttccaaaatgtcgtaataaccccgccccgttgacgcaaatgggcggtaggcgtgtacggtgggaggtctatataagcagagctcgtttagtgaaccgtc

SEQ ID NO: 18796 - DNA, 424 bp, synthetic construct
  source 1..424: mol_type = other DNA
gggactttccattgacgtcaatgggtggagtatttacggtaaactgcccacttggcagtacatcaagtgtatcatatgccaagtccgccccctattgacgtcaatgacggtaaatggcccgcctggcattatgcccagtacatgaccttacgggactttcctacttggcagtacatctacgtattagtcatcgctattaccatggtgatgcggttttggcagtacaccaatgggcgtggatagcggtttgactcacggggatttccaagtctccaccccattgacgtcaatgggagtttgttttggcaccaaaatcaacgggactttccaaaatgtcgtaataaccccgccccgttgacgcaaatgggcggtaggcgtgtacggtgggaggtctatataagcagagctcgtttagtgaaccgtc

SEQ ID NO: 18797 - DNA, 423 bp, synthetic construct
  source 1..423: mol_type = other DNA
ggactttccattgacgtcaatgggtggagtatttacggtaaactgcccacttggcagtacatcaagtgtatcatatgccaagtccgccccctattgacgtcaatgacggtaaatggcccgcctggcattatgcccagtacatgaccttacgggactttcctacttggcagtacatctacgtattagtcatcgctattaccatggtgatgcggttttggcagtacaccaatgggcgtggatagcggtttgactcacggggatttccaagtctccaccccattgacgtcaatgggagtttgttttggcaccaaaatcaacgggactttccaaaatgtcgtaataaccccgccccgttgacgcaaatgggcggtaggcgtgtacggtgggaggtctatataagcagagctcgtttagtgaaccgtc

SEQ ID NO: 18798 - DNA, 422 bp, synthetic construct
  source 1..422: mol_type = other DNA
gactttccattgacgtcaatgggtggagtatttacggtaaactgcccacttggcagtacatcaagtgtatcatatgccaagtccgccccctattgacgtcaatgacggtaaatggcccgcctggcattatgcccagtacatgaccttacgggactttcctacttggcagtacatctacgtattagtcatcgctattaccatggtgatgcggttttggcagtacaccaatgggcgtggatagcggtttgactcacggggatttccaagtctccaccccattgacgtcaatgggagtttgttttggcaccaaaatcaacgggactttccaaaatgtcgtaataaccccgccccgttgacgcaaatgggcggtaggcgtgtacggtgggaggtctatataagcagagctcgtttagtgaaccgtc

SEQ ID NO: 18799 - DNA, 421 bp, synthetic construct
  source 1..421: mol_type = other DNA
actttccattgacgtcaatgggtggagtatttacggtaaactgcccacttggcagtacatcaagtgtatcatatgccaagtccgccccctattgacgtcaatgacggtaaatggcccgcctggcattatgcccagtacatgaccttacgggactttcctacttggcagtacatctacgtattagtcatcgctattaccatggtgatgcggttttggcagtacaccaatgggcgtggatagcggtttgactcacggggatttccaagtctccaccccattgacgtcaatgggagtttgttttggcaccaaaatcaacgggactttccaaaatgtcgtaataaccccgccccgttgacgcaaatgggcggtaggcgtgtacggtgggaggtctatataagcagagctcgtttagtgaaccgtc

SEQ ID NO: 18800 - DNA, 420 bp, synthetic construct
  source 1..420: mol_type = other DNA
ctttccattgacgtcaatgggtggagtatttacggtaaactgcccacttggcagtacatcaagtgtatcatatgccaagtccgccccctattgacgtcaatgacggtaaatggcccgcctggcattatgcccagtacatgaccttacgggactttcctacttggcagtacatctacgtattagtcatcgctattaccatggtgatgcggttttggcagtacaccaatgggcgtggatagcggtttgactcacggggatttccaagtctccaccccattgacgtcaatgggagtttgttttggcaccaaaatcaacgggactttccaaaatgtcgtaataaccccgccccgttgacgcaaatgggcggtaggcgtgtacggtgggaggtctatataagcagagctcgtttagtgaaccgtc

SEQ ID NO: 18801 - DNA, 419 bp, synthetic construct
  source 1..419: mol_type = other DNA
tttccattgacgtcaatgggtggagtatttacggtaaactgcccacttggcagtacatcaagtgtatcatatgccaagtccgccccctattgacgtcaatgacggtaaatggcccgcctggcattatgcccagtacatgaccttacgggactttcctacttggcagtacatctacgtattagtcatcgctattaccatggtgatgcggttttggcagtacaccaatgggcgtggatagcggtttgactcacggggatttccaagtctccaccccattgacgtcaatgggagtttgttttggcaccaaaatcaacgggactttccaaaatgtcgtaataaccccgccccgttgacgcaaatgggcggtaggcgtgtacggtgggaggtctatataagcagagctcgtttagtgaaccgtc

SEQ ID NO: 18802 - DNA, 418 bp, synthetic construct
  source 1..418: mol_type = other DNA
ttccattgacgtcaatgggtggagtatttacggtaaactgcccacttggcagtacatcaagtgtatcatatgccaagtccgccccctattgacgtcaatgacggtaaatggcccgcctggcattatgcccagtacatgaccttacgggactttcctacttggcagtacatctacgtattagtcatcgctattaccatggtgatgcggttttggcagtacaccaatgggcgtggatagcggtttgactcacggggatttccaagtctccaccccattgacgtcaatgggagtttgttttggcaccaaaatcaacgggactttccaaaatgtcgtaataaccccgccccgttgacgcaaatgggcggtaggcgtgtacggtgggaggtctatataagcagagctcgtttagtgaaccgtc

SEQ ID NO: 18803 - DNA, 417 bp, synthetic construct
  source 1..417: mol_type = other DNA
tccattgacgtcaatgggtggagtatttacggtaaactgcccacttggcagtacatcaagtgtatcatatgccaagtccgccccctattgacgtcaatgacggtaaatggcccgcctggcattatgcccagtacatgaccttacgggactttcctacttggcagtacatctacgtattagtcatcgctattaccatggtgatgcggttttggcagtacaccaatgggcgtggatagcggtttgactcacggggatttccaagtctccaccccattgacgtcaatgggagtttgttttggcaccaaaatcaacgggactttccaaaatgtcgtaataaccccgccccgttgacgcaaatgggcggtaggcgtgtacggtgggaggtctatataagcagagctcgtttagtgaaccgtc

SEQ ID NO: 18804 - DNA, 416 bp, synthetic construct
  source 1..416: mol_type = other DNA
ccattgacgtcaatgggtggagtatttacggtaaactgcccacttggcagtacatcaagtgtatcatatgccaagtccgccccctattgacgtcaatgacggtaaatggcccgcctggcattatgcccagtacatgaccttacgggactttcctacttggcagtacatctacgtattagtcatcgctattaccatggtgatgcggttttggcagtacaccaatgggcgtggatagcggtttgactcacggggatttccaagtctccaccccattgacgtcaatgggagtttgttttggcaccaaaatcaacgggactttccaaaatgtcgtaataaccccgccccgttgacgcaaatgggcggtaggcgtgtacggtgggaggtctatataagcagagctcgtttagtgaaccgtc

SEQ ID NO: 18805 - DNA, 415 bp, synthetic construct
  source 1..415: mol_type = other DNA
cattgacgtcaatgggtggagtatttacggtaaactgcccacttggcagtacatcaagtgtatcatatgccaagtccgccccctattgacgtcaatgacggtaaatggcccgcctggcattatgcccagtacatgaccttacgggactttcctacttggcagtacatctacgtattagtcatcgctattaccatggtgatgcggttttggcagtacaccaatgggcgtggatagcggtttgactcacggggatttccaagtctccaccccattgacgtcaatgggagtttgttttggcaccaaaatcaacgggactttccaaaatgtcgtaataaccccgccccgttgacgcaaatgggcggtaggcgtgtacggtgggaggtctatataagcagagctcgtttagtgaaccgtc

SEQ ID NO: 18806 - DNA, 414 bp, synthetic construct
  source 1..414: mol_type = other DNA
attgacgtcaatgggtggagtatttacggtaaactgcccacttggcagtacatcaagtgtatcatatgccaagtccgccccctattgacgtcaatgacggtaaatggcccgcctggcattatgcccagtacatgaccttacgggactttcctacttggcagtacatctacgtattagtcatcgctattaccatggtgatgcggttttggcagtacaccaatgggcgtggatagcggtttgactcacggggatttccaagtctccaccccattgacgtcaatgggagtttgttttggcaccaaaatcaacgggactttccaaaatgtcgtaataaccccgccccgttgacgcaaatgggcggtaggcgtgtacggtgggaggtctatataagcagagctcgtttagtgaaccgtc

SEQ ID NO: 18807 - DNA, 413 bp, synthetic construct
  source 1..413: mol_type = other DNA
ttgacgtcaatgggtggagtatttacggtaaactgcccacttggcagtacatcaagtgtatcatatgccaagtccgccccctattgacgtcaatgacggtaaatggcccgcctggcattatgcccagtacatgaccttacgggactttcctacttggcagtacatctacgtattagtcatcgctattaccatggtgatgcggttttggcagtacaccaatgggcgtggatagcggtttgactcacggggatttccaagtctccaccccattgacgtcaatgggagtttgttttggcaccaaaatcaacgggactttccaaaatgtcgtaataaccccgccccgttgacgcaaatgggcggtaggcgtgtacggtgggaggtctatataagcagagctcgtttagtgaaccgtc

SEQ ID NO: 18808 - DNA, 412 bp, synthetic construct
  source 1..412: mol_type = other DNA
tgacgtcaatgggtggagtatttacggtaaactgcccacttggcagtacatcaagtgtatcatatgccaagtccgccccctattgacgtcaatgacggtaaatggcccgcctggcattatgcccagtacatgaccttacgggactttcctacttggcagtacatctacgtattagtcatcgctattaccatggtgatgcggttttggcagtacaccaatgggcgtggatagcggtttgactcacggggatttccaagtctccaccccattgacgtcaatgggagtttgttttggcaccaaaatcaacgggactttccaaaatgtcgtaataaccccgccccgttgacgcaaatgggcggtaggcgtgtacggtgggaggtctatataagcagagctcgtttagtgaaccgtc

SEQ ID NO: 18809 - DNA, 411 bp, synthetic construct
  source 1..411: mol_type = other DNA
gacgtcaatgggtggagtatttacggtaaactgcccacttggcagtacatcaagtgtatcatatgccaagtccgccccctattgacgtcaatgacggtaaatggcccgcctggcattatgcccagtacatgaccttacgggactttcctacttggcagtacatctacgtattagtcatcgctattaccatggtgatgcggttttggcagtacaccaatgggcgtggatagcggtttgactcacggggatttccaagtctccaccccattgacgtcaatgggagtttgttttggcaccaaaatcaacgggactttccaaaatgtcgtaataaccccgccccgttgacgcaaatgggcggtaggcgtgtacggtgggaggtctatataagcagagctcgtttagtgaaccgtc

SEQ ID NO: 18810 - DNA, 410 bp, synthetic construct
  source 1..410: mol_type = other DNA
acgtcaatgggtggagtatttacggtaaactgcccacttggcagtacatcaagtgtatcatatgccaagtccgccccctattgacgtcaatgacggtaaatggcccgcctggcattatgcccagtacatgaccttacgggactttcctacttggcagtacatctacgtattagtcatcgctattaccatggtgatgcggttttggcagtacaccaatgggcgtggatagcggtttgactcacggggatttccaagtctccaccccattgacgtcaatgggagtttgttttggcaccaaaatcaacgggactttccaaaatgtcgtaataaccccgccccgttgacgcaaatgggcggtaggcgtgtacggtgggaggtctatataagcagagctcgtttagtgaaccgtc

SEQ ID NO: 18811 - DNA, 409 bp, synthetic construct
  source 1..409: mol_type = other DNA
cgtcaatgggtggagtatttacggtaaactgcccacttggcagtacatcaagtgtatcatatgccaagtccgccccctattgacgtcaatgacggtaaatggcccgcctggcattatgcccagtacatgaccttacgggactttcctacttggcagtacatctacgtattagtcatcgctattaccatggtgatgcggttttggcagtacaccaatgggcgtggatagcggtttgactcacggggatttccaagtctccaccccattgacgtcaatgggagtttgttttggcaccaaaatcaacgggactttccaaaatgtcgtaataaccccgccccgttgacgcaaatgggcggtaggcgtgtacggtgggaggtctatataagcagagctcgtttagtgaaccgtc

SEQ ID NO: 18812 - DNA, 408 bp, synthetic construct
  source 1..408: mol_type = other DNA
gtcaatgggtggagtatttacggtaaactgcccacttggcagtacatcaagtgtatcatatgccaagtccgccccctattgacgtcaatgacggtaaatggcccgcctggcattatgcccagtacatgaccttacgggactttcctacttggcagtacatctacgtattagtcatcgctattaccatggtgatgcggttttggcagtacaccaatgggcgtggatagcggtttgactcacggggatttccaagtctccaccccattgacgtcaatgggagtttgttttggcaccaaaatcaacgggactttccaaaatgtcgtaataaccccgccccgttgacgcaaatgggcggtaggcgtgtacggtgggaggtctatataagcagagctcgtttagtgaaccgtc

SEQ ID NO: 18813 - DNA, 407 bp, synthetic construct
  source 1..407: mol_type = other DNA
tcaatgggtggagtatttacggtaaactgcccacttggcagtacatcaagtgtatcatatgccaagtccgccccctattgacgtcaatgacggtaaatggcccgcctggcattatgcccagtacatgaccttacgggactttcctacttggcagtacatctacgtattagtcatcgctattaccatggtgatgcggttttggcagtacaccaatgggcgtggatagcggtttgactcacggggatttccaagtctccaccccattgacgtcaatgggagtttgttttggcaccaaaatcaacgggactttccaaaatgtcgtaataaccccgccccgttgacgcaaatgggcggtaggcgtgtacggtgggaggtctatataagcagagctcgtttagtgaaccgtc

SEQ ID NO: 18814 - DNA, 406 bp, synthetic construct
  source 1..406: mol_type = other DNA
caatgggtggagtatttacggtaaactgcccacttggcagtacatcaagtgtatcatatgccaagtccgccccctattgacgtcaatgacggtaaatggcccgcctggcattatgcccagtacatgaccttacgggactttcctacttggcagtacatctacgtattagtcatcgctattaccatggtgatgcggttttggcagtacaccaatgggcgtggatagcggtttgactcacggggatttccaagtctccaccccattgacgtcaatgggagtttgttttggcaccaaaatcaacgggactttccaaaatgtcgtaataaccccgccccgttgacgcaaatgggcggtaggcgtgtacggtgggaggtctatataagcagagctcgtttagtgaaccgtc

SEQ ID NO: 18815 - DNA, 405 bp, synthetic construct
  source 1..405: mol_type = other DNA
aatgggtggagtatttacggtaaactgcccacttggcagtacatcaagtgtatcatatgccaagtccgccccctattgacgtcaatgacggtaaatggcccgcctggcattatgcccagtacatgaccttacgggactttcctacttggcagtacatctacgtattagtcatcgctattaccatggtgatgcggttttggcagtacaccaatgggcgtggatagcggtttgactcacggggatttccaagtctccaccccattgacgtcaatgggagtttgttttggcaccaaaatcaacgggactttccaaaatgtcgtaataaccccgccccgttgacgcaaatgggcggtaggcgtgtacggtgggaggtctatataagcagagctcgtttagtgaaccgtc

SEQ ID NO: 18816 - DNA, 404 bp, synthetic construct
  source 1..404: mol_type = other DNA
atgggtggagtatttacggtaaactgcccacttggcagtacatcaagtgtatcatatgccaagtccgccccctattgacgtcaatgacggtaaatggcccgcctggcattatgcccagtacatgaccttacgggactttcctacttggcagtacatctacgtattagtcatcgctattaccatggtgatgcggttttggcagtacaccaatgggcgtggatagcggtttgactcacggggatttccaagtctccaccccattgacgtcaatgggagtttgttttggcaccaaaatcaacgggactttccaaaatgtcgtaataaccccgccccgttgacgcaaatgggcggtaggcgtgtacggtgggaggtctatataagcagagctcgtttagtgaaccgtc

SEQ ID NO: 18817 - DNA, 403 bp, synthetic construct
  source 1..403: mol_type = other DNA
tgggtggagtatttacggtaaactgcccacttggcagtacatcaagtgtatcatatgccaagtccgccccctattgacgtcaatgacggtaaatggcccgcctggcattatgcccagtacatgaccttacgggactttcctacttggcagtacatctacgtattagtcatcgctattaccatggtgatgcggttttggcagtacaccaatgggcgtggatagcggtttgactcacggggatttccaagtctccaccccattgacgtcaatgggagtttgttttggcaccaaaatcaacgggactttccaaaatgtcgtaataaccccgccccgttgacgcaaatgggcggtaggcgtgtacggtgggaggtctatataagcagagctcgtttagtgaaccgtc

SEQ ID NO: 18818 - DNA, 402 bp, synthetic construct
  source 1..402: mol_type = other DNA
gggtggagtatttacggtaaactgcccacttggcagtacatcaagtgtatcatatgccaagtccgccccctattgacgtcaatgacggtaaatggcccgcctggcattatgcccagtacatgaccttacgggactttcctacttggcagtacatctacgtattagtcatcgctattaccatggtgatgcggttttggcagtacaccaatgggcgtggatagcggtttgactcacggggatttccaagtctccaccccattgacgtcaatgggagtttgttttggcaccaaaatcaacgggactttccaaaatgtcgtaataaccccgccccgttgacgcaaatgggcggtaggcgtgtacggtgggaggtctatataagcagagctcgtttagtgaaccgtc

SEQ ID NO: 18819 - DNA, 401 bp, synthetic construct
  source 1..401: mol_type = other DNA
ggtggagtatttacggtaaactgcccacttggcagtacatcaagtgtatcatatgccaagtccgccccctattgacgtcaatgacggtaaatggcccgcctggcattatgcccagtacatgaccttacgggactttcctacttggcagtacatctacgtattagtcatcgctattaccatggtgatgcggttttggcagtacaccaatgggcgtggatagcggtttgactcacggggatttccaagtctccaccccattgacgtcaatgggagtttgttttggcaccaaaatcaacgggactttccaaaatgtcgtaataaccccgccccgttgacgcaaatgggcggtaggcgtgtacggtgggaggtctatataagcagagctcgtttagtgaaccgtc

SEQ ID NO: 18820 - DNA, 400 bp, synthetic construct
  source 1..400: mol_type = other DNA
gtggagtatttacggtaaactgcccacttggcagtacatcaagtgtatcatatgccaagtccgccccctattgacgtcaatgacggtaaatggcccgcctggcattatgcccagtacatgaccttacgggactttcctacttggcagtacatctacgtattagtcatcgctattaccatggtgatgcggttttggcagtacaccaatgggcgtggatagcggtttgactcacggggatttccaagtctccaccccattgacgtcaatgggagtttgttttggcaccaaaatcaacgggactttccaaaatgtcgtaataaccccgccccgttgacgcaaatgggcggtaggcgtgtacggtgggaggtctatataagcagagctcgtttagtgaaccgtc

SEQ ID NO: 18821 - DNA, 399 bp, synthetic construct
  source 1..399: mol_type = other DNA
tggagtatttacggtaaactgcccacttggcagtacatcaagtgtatcatatgccaagtccgccccctattgacgtcaatgacggtaaatggcccgcctggcattatgcccagtacatgaccttacgggactttcctacttggcagtacatctacgtattagtcatcgctattaccatggtgatgcggttttggcagtacaccaatgggcgtggatagcggtttgactcacggggatttccaagtctccaccccattgacgtcaatgggagtttgttttggcaccaaaatcaacgggactttccaaaatgtcgtaataaccccgccccgttgacgcaaatgggcggtaggcgtgtacggtgggaggtctatataagcagagctcgtttagtgaaccgtc

SEQ ID NO: 18822 - DNA, 398 bp, synthetic construct
  source 1..398: mol_type = other DNA
ggagtatttacggtaaactgcccacttggcagtacatcaagtgtatcatatgccaagtccgccccctattgacgtcaatgacggtaaatggcccgcctggcattatgcccagtacatgaccttacgggactttcctacttggcagtacatctacgtattagtcatcgctattaccatggtgatgcggttttggcagtacaccaatgggcgtggatagcggtttgactcacggggatttccaagtctccaccccattgacgtcaatgggagtttgttttggcaccaaaatcaacgggactttccaaaatgtcgtaataaccccgccccgttgacgcaaatgggcggtaggcgtgtacggtgggaggtctatataagcagagctcgtttagtgaaccgtc

SEQ ID NO: 18823 - DNA, 397 bp, synthetic construct
  source 1..397: mol_type = other DNA
gagtatttacggtaaactgcccacttggcagtacatcaagtgtatcatatgccaagtccgccccctattgacgtcaatgacggtaaatggcccgcctggcattatgcccagtacatgaccttacgggactttcctacttggcagtacatctacgtattagtcatcgctattaccatggtgatgcggttttggcagtacaccaatgggcgtggatagcggtttgactcacggggatttccaagtctccaccccattgacgtcaatgggagtttgttttggcaccaaaatcaacgggactttccaaaatgtcgtaataaccccgccccgttgacgcaaatgggcggtaggcgtgtacggtgggaggtctatataagcagagctcgtttagtgaaccgtc

SEQ ID NO: 18824 - DNA, 396 bp, synthetic construct
  source 1..396: mol_type = other DNA
agtatttacggtaaactgcccacttggcagtacatcaagtgtatcatatgccaagtccgccccctattgacgtcaatgacggtaaatggcccgcctggcattatgcccagtacatgaccttacgggactttcctacttggcagtacatctacgtattagtcatcgctattaccatggtgatgcggttttggcagtacaccaatgggcgtggatagcggtttgactcacggggatttccaagtctccaccccattgacgtcaatgggagtttgttttggcaccaaaatcaacgggactttccaaaatgtcgtaataaccccgccccgttgacgcaaatgggcggtaggcgtgtacggtgggaggtctatataagcagagctcgtttagtgaaccgtc

SEQ ID NO: 18825 - DNA, 395 bp, synthetic construct
  source 1..395: mol_type = other DNA
gtatttacggtaaactgcccacttggcagtacatcaagtgtatcatatgccaagtccgccccctattgacgtcaatgacggtaaatggcccgcctggcattatgcccagtacatgaccttacgggactttcctacttggcagtacatctacgtattagtcatcgctattaccatggtgatgcggttttggcagtacaccaatgggcgtggatagcggtttgactcacggggatttccaagtctccaccccattgacgtcaatgggagtttgttttggcaccaaaatcaacgggactttccaaaatgtcgtaataaccccgccccgttgacgcaaatgggcggtaggcgtgtacggtgggaggtctatataagcagagctcgtttagtgaaccgtc

SEQ ID NO: 18826 - DNA, 394 bp, synthetic construct
  source 1..394: mol_type = other DNA
tatttacggtaaactgcccacttggcagtacatcaagtgtatcatatgccaagtccgccccctattgacgtcaatgacggtaaatggcccgcctggcattatgcccagtacatgaccttacgggactttcctacttggcagtacatctacgtattagtcatcgctattaccatggtgatgcggttttggcagtacaccaatgggcgtggatagcggtttgactcacggggatttccaagtctccaccccattgacgtcaatgggagtttgttttggcaccaaaatcaacgggactttccaaaatgtcgtaataaccccgccccgttgacgcaaatgggcggtaggcgtgtacggtgggaggtctatataagcagagctcgtttagtgaaccgtc

SEQ ID NO: 18827 - DNA, 393 bp, synthetic construct
  source 1..393: mol_type = other DNA
atttacggtaaactgcccacttggcagtacatcaagtgtatcatatgccaagtccgccccctattgacgtcaatgacggtaaatggcccgcctggcattatgcccagtacatgaccttacgggactttcctacttggcagtacatctacgtattagtcatcgctattaccatggtgatgcggttttggcagtacaccaatgggcgtggatagcggtttgactcacggggatttccaagtctccaccccattgacgtcaatgggagtttgttttggcaccaaaatcaacgggactttccaaaatgtcgtaataaccccgccccgttgacgcaaatgggcggtaggcgtgtacggtgggaggtctatataagcagagctcgtttagtgaaccgtc

SEQ ID NO: 18828 - DNA, 392 bp, synthetic construct
  source 1..392: mol_type = other DNA
tttacggtaaactgcccacttggcagtacatcaagtgtatcatatgccaagtccgccccctattgacgtcaatgacggtaaatggcccgcctggcattatgcccagtacatgaccttacgggactttcctacttggcagtacatctacgtattagtcatcgctattaccatggtgatgcggttttggcagtacaccaatgggcgtggatagcggtttgactcacggggatttccaagtctccaccccattgacgtcaatgggagtttgttttggcaccaaaatcaacgggactttccaaaatgtcgtaataaccccgccccgttgacgcaaatgggcggtaggcgtgtacggtgggaggtctatataagcagagctcgtttagtgaaccgtc

SEQ ID NO: 18829 - DNA, 391 bp, synthetic construct
  source 1..391: mol_type = other DNA
ttacggtaaactgcccacttggcagtacatcaagtgtatcatatgccaagtccgccccctattgacgtcaatgacggtaaatggcccgcctggcattatgcccagtacatgaccttacgggactttcctacttggcagtacatctacgtattagtcatcgctattaccatggtgatgcggttttggcagtacaccaatgggcgtggatagcggtttgactcacggggatttccaagtctccaccccattgacgtcaatgggagtttgttttggcaccaaaatcaacgggactttccaaaatgtcgtaataaccccgccccgttgacgcaaatgggcggtaggcgtgtacggtgggaggtctatataagcagagctcgtttagtgaaccgtc

SEQ ID NO: 18830 - DNA, 390 bp, synthetic construct
  source 1..390: mol_type = other DNA
tacggtaaactgcccacttggcagtacatcaagtgtatcatatgccaagtccgccccctattgacgtcaatgacggtaaatggcccgcctggcattatgcccagtacatgaccttacgggactttcctacttggcagtacatctacgtattagtcatcgctattaccatggtgatgcggttttggcagtacaccaatgggcgtggatagcggtttgactcacggggatttccaagtctccaccccattgacgtcaatgggagtttgttttggcaccaaaatcaacgggactttccaaaatgtcgtaataaccccgccccgttgacgcaaatgggcggtaggcgtgtacggtgggaggtctatataagcagagctcgtttagtgaaccgtc

SEQ ID NO: 18831 - DNA, 389 bp, synthetic construct
  source 1..389: mol_type = other DNA
acggtaaactgcccacttggcagtacatcaagtgtatcatatgccaagtccgccccctattgacgtcaatgacggtaaatggcccgcctggcattatgcccagtacatgaccttacgggactttcctacttggcagtacatctacgtattagtcatcgctattaccatggtgatgcggttttggcagtacaccaatgggcgtggatagcggtttgactcacggggatttccaagtctccaccccattgacgtcaatgggagtttgttttggcaccaaaatcaacgggactttccaaaatgtcgtaataaccccgccccgttgacgcaaatgggcggtaggcgtgtacggtgggaggtctatataagcagagctcgtttagtgaaccgtc

SEQ ID NO: 18832 - DNA, 388 bp, synthetic construct
  source 1..388: mol_type = other DNA
cggtaaactgcccacttggcagtacatcaagtgtatcatatgccaagtccgccccctattgacgtcaatgacggtaaatggcccgcctggcattatgcccagtacatgaccttacgggactttcctacttggcagtacatctacgtattagtcatcgctattaccatggtgatgcggttttggcagtacaccaatgggcgtggatagcggtttgactcacggggatttccaagtctccaccccattgacgtcaatgggagtttgttttggcaccaaaatcaacgggactttccaaaatgtcgtaataaccccgccccgttgacgcaaatgggcggtaggcgtgtacggtgggaggtctatataagcagagctcgtttagtgaaccgtc

SEQ ID NO: 18833 - DNA, 387 bp, synthetic construct
  source 1..387: mol_type = other DNA
ggtaaactgcccacttggcagtacatcaagtgtatcatatgccaagtccgccccctattgacgtcaatgacggtaaatggcccgcctggcattatgcccagtacatgaccttacgggactttcctacttggcagtacatctacgtattagtcatcgctattaccatggtgatgcggttttggcagtacaccaatgggcgtggatagcggtttgactcacggggatttccaagtctccaccccattgacgtcaatgggagtttgttttggcaccaaaatcaacgggactttccaaaatgtcgtaataaccccgccccgttgacgcaaatgggcggtaggcgtgtacggtgggaggtctatataagcagagctcgtttagtgaaccgtc

SEQ ID NO: 18834 - DNA, 386 bp, synthetic construct
  source 1..386: mol_type = other DNA
gtaaactgcccacttggcagtacatcaagtgtatcatatgccaagtccgccccctattgacgtcaatgacggtaaatggcccgcctggcattatgcccagtacatgaccttacgggactttcctacttggcagtacatctacgtattagtcatcgctattaccatggtgatgcggttttggcagtacaccaatgggcgtggatagcggtttgactcacggggatttccaagtctccaccccattgacgtcaatgggagtttgttttggcaccaaaatcaacgggactttccaaaatgtcgtaataaccccgccccgttgacgcaaatgggcggtaggcgtgtacggtgggaggtctatataagcagagctcgtttagtgaaccgtc

SEQ ID NO: 18835 - DNA, 385 bp, synthetic construct
  source 1..385: mol_type = other DNA
taaactgcccacttggcagtacatcaagtgtatcatatgccaagtccgccccctattgacgtcaatgacggtaaatggcccgcctggcattatgcccagtacatgaccttacgggactttcctacttggcagtacatctacgtattagtcatcgctattaccatggtgatgcggttttggcagtacaccaatgggcgtggatagcggtttgactcacggggatttccaagtctccaccccattgacgtcaatgggagtttgttttggcaccaaaatcaacgggactttccaaaatgtcgtaataaccccgccccgttgacgcaaatgggcggtaggcgtgtacggtgggaggtctatataagcagagctcgtttagtgaaccgtc

SEQ ID NO: 18836 - DNA, 384 bp, synthetic construct
  source 1..384: mol_type = other DNA
aaactgcccacttggcagtacatcaagtgtatcatatgccaagtccgccccctattgacgtcaatgacggtaaatggcccgcctggcattatgcccagtacatgaccttacgggactttcctacttggcagtacatctacgtattagtcatcgctattaccatggtgatgcggttttggcagtacaccaatgggcgtggatagcggtttgactcacggggatttccaagtctccaccccattgacgtcaatgggagtttgttttggcaccaaaatcaacgggactttccaaaatgtcgtaataaccccgccccgttgacgcaaatgggcggtaggcgtgtacggtgggaggtctatataagcagagctcgtttagtgaaccgtc

SEQ ID NO: 18837 - DNA, 383 bp, synthetic construct
  source 1..383: mol_type = other DNA
aactgcccacttggcagtacatcaagtgtatcatatgccaagtccgccccctattgacgtcaatgacggtaaatggcccgcctggcattatgcccagtacatgaccttacgggactttcctacttggcagtacatctacgtattagtcatcgctattaccatggtgatgcggttttggcagtacaccaatgggcgtggatagcggtttgactcacggggatttccaagtctccaccccattgacgtcaatgggagtttgttttggcaccaaaatcaacgggactttccaaaatgtcgtaataaccccgccccgttgacgcaaatgggcggtaggcgtgtacggtgggaggtctatataagcagagctcgtttagtgaaccgtc

SEQ ID NO: 18838 - DNA, 382 bp, synthetic construct
  source 1..382: mol_type = other DNA
actgcccacttggcagtacatcaagtgtatcatatgccaagtccgccccctattgacgtcaatgacggtaaatggcccgcctggcattatgcccagtacatgaccttacgggactttcctacttggcagtacatctacgtattagtcatcgctattaccatggtgatgcggttttggcagtacaccaatgggcgtggatagcggtttgactcacggggatttccaagtctccaccccattgacgtcaatgggagtttgttttggcaccaaaatcaacgggactttccaaaatgtcgtaataaccccgccccgttgacgcaaatgggcggtaggcgtgtacggtgggaggtctatataagcagagctcgtttagtgaaccgtc

SEQ ID NO: 18839 - DNA, 381 bp, synthetic construct
  source 1..381: mol_type = other DNA
ctgcccacttggcagtacatcaagtgtatcatatgccaagtccgccccctattgacgtcaatgacggtaaatggcccgcctggcattatgcccagtacatgaccttacgggactttcctacttggcagtacatctacgtattagtcatcgctattaccatggtgatgcggttttggcagtacaccaatgggcgtggatagcggtttgactcacggggatttccaagtctccaccccattgacgtcaatgggagtttgttttggcaccaaaatcaacgggactttccaaaatgtcgtaataaccccgccccgttgacgcaaatgggcggtaggcgtgtacggtgggaggtctatataagcagagctcgtttagtgaaccgtc

SEQ ID NO: 18840 - DNA, 380 bp, synthetic construct
  source 1..380: mol_type = other DNA
tgcccacttggcagtacatcaagtgtatcatatgccaagtccgccccctattgacgtcaatgacggtaaatggcccgcctggcattatgcccagtacatgaccttacgggactttcctacttggcagtacatctacgtattagtcatcgctattaccatggtgatgcggttttggcagtacaccaatgggcgtggatagcggtttgactcacggggatttccaagtctccaccccattgacgtcaatgggagtttgttttggcaccaaaatcaacgggactttccaaaatgtcgtaataaccccgccccgttgacgcaaatgggcggtaggcgtgtacggtgggaggtctatataagcagagctcgtttagtgaaccgtc

SEQ ID NO: 18841 - DNA, 379 bp, synthetic construct
  source 1..379: mol_type = other DNA
gcccacttggcagtacatcaagtgtatcatatgccaagtccgccccctattgacgtcaatgacggtaaatggcccgcctggcattatgcccagtacatgaccttacgggactttcctacttggcagtacatctacgtattagtcatcgctattaccatggtgatgcggttttggcagtacaccaatgggcgtggatagcggtttgactcacggggatttccaagtctccaccccattgacgtcaatgggagtttgttttggcaccaaaatcaacgggactttccaaaatgtcgtaataaccccgccccgttgacgcaaatgggcggtaggcgtgtacggtgggaggtctatataagcagagctcgtttagtgaaccgtc

SEQ ID NO: 18842 - DNA, 378 bp, synthetic construct
  source 1..378: mol_type = other DNA
cccacttggcagtacatcaagtgtatcatatgccaagtccgccccctattgacgtcaatgacggtaaatggcccgcctggcattatgcccagtacatgaccttacgggactttcctacttggcagtacatctacgtattagtcatcgctattaccatggtgatgcggttttggcagtacaccaatgggcgtggatagcggtttgactcacggggatttccaagtctccaccccattgacgtcaatgggagtttgttttggcaccaaaatcaacgggactttccaaaatgtcgtaataaccccgccccgttgacgcaaatgggcggtaggcgtgtacggtgggaggtctatataagcagagctcgtttagtgaaccgtc

SEQ ID NO: 18843 - DNA, 377 bp, synthetic construct
  source 1..377: mol_type = other DNA
ccacttggcagtacatcaagtgtatcatatgccaagtccgccccctattgacgtcaatgacggtaaatggcccgcctggcattatgcccagtacatgaccttacgggactttcctacttggcagtacatctacgtattagtcatcgctattaccatggtgatgcggttttggcagtacaccaatgggcgtggatagcggtttgactcacggggatttccaagtctccaccccattgacgtcaatgggagtttgttttggcaccaaaatcaacgggactttccaaaatgtcgtaataaccccgccccgttgacgcaaatgggcggtaggcgtgtacggtgggaggtctatataagcagagctcgtttagtgaaccgtc

SEQ ID NO: 18844 - DNA, 376 bp, synthetic construct
  source 1..376: mol_type = other DNA
cacttggcagtacatcaagtgtatcatatgccaagtccgccccctattgacgtcaatgacggtaaatggcccgcctggcattatgcccagtacatgaccttacgggactttcctacttggcagtacatctacgtattagtcatcgctattaccatggtgatgcggttttggcagtacaccaatgggcgtggatagcggtttgactcacggggatttccaagtctccaccccattgacgtcaatgggagtttgttttggcaccaaaatcaacgggactttccaaaatgtcgtaataaccccgccccgttgacgcaaatgggcggtaggcgtgtacggtgggaggtctatataagcagagctcgtttagtgaaccgtc

SEQ ID NO: 18845 - DNA, 375 bp, synthetic construct
  source 1..375: mol_type = other DNA
acttggcagtacatcaagtgtatcatatgccaagtccgccccctattgacgtcaatgacggtaaatggcccgcctggcattatgcccagtacatgaccttacgggactttcctacttggcagtacatctacgtattagtcatcgctattaccatggtgatgcggttttggcagtacaccaatgggcgtggatagcggtttgactcacggggatttccaagtctccaccccattgacgtcaatgggagtttgttttggcaccaaaatcaacgggactttccaaaatgtcgtaataaccccgccccgttgacgcaaatgggcggtaggcgtgtacggtgggaggtctatataagcagagctcgtttagtgaaccgtc

SEQ ID NO: 18846 - DNA, 374 bp, synthetic construct
  source 1..374: mol_type = other DNA
cttggcagtacatcaagtgtatcatatgccaagtccgccccctattgacgtcaatgacggtaaatggcccgcctggcattatgcccagtacatgaccttacgggactttcctacttggcagtacatctacgtattagtcatcgctattaccatggtgatgcggttttggcagtacaccaatgggcgtggatagcggtttgactcacggggatttccaagtctccaccccattgacgtcaatgggagtttgttttggcaccaaaatcaacgggactttccaaaatgtcgtaataaccccgccccgttgacgcaaatgggcggtaggcgtgtacggtgggaggtctatataagcagagctcgtttagtgaaccgtc

SEQ ID NO: 18847 - DNA, 373 bp, synthetic construct
  source 1..373: mol_type = other DNA
ttggcagtacatcaagtgtatcatatgccaagtccgccccctattgacgtcaatgacggtaaatggcccgcctggcattatgcccagtacatgaccttacgggactttcctacttggcagtacatctacgtattagtcatcgctattaccatggtgatgcggttttggcagtacaccaatgggcgtggatagcggtttgactcacggggatttccaagtctccaccccattgacgtcaatgggagtttgttttggcaccaaaatcaacgggactttccaaaatgtcgtaataaccccgccccgttgacgcaaatgggcggtaggcgtgtacggtgggaggtctatataagcagagctcgtttagtgaaccgtc

SEQ ID NO: 18848 - DNA, 372 bp, synthetic construct
  source 1..372: mol_type = other DNA
tggcagtacatcaagtgtatcatatgccaagtccgccccctattgacgtcaatgacggtaaatggcccgcctggcattatgcccagtacatgaccttacgggactttcctacttggcagtacatctacgtattagtcatcgctattaccatggtgatgcggttttggcagtacaccaatgggcgtggatagcggtttgactcacggggatttccaagtctccaccccattgacgtcaatgggagtttgttttggcaccaaaatcaacgggactttccaaaatgtcgtaataaccccgccccgttgacgcaaatgggcggtaggcgtgtacggtgggaggtctatataagcagagctcgtttagtgaaccgtc

SEQ ID NO: 18849 - DNA, 371 bp, synthetic construct
  source 1..371: mol_type = other DNA
ggcagtacatcaagtgtatcatatgccaagtccgccccctattgacgtcaatgacggtaaatggcccgcctggcattatgcccagtacatgaccttacgggactttcctacttggcagtacatctacgtattagtcatcgctattaccatggtgatgcggttttggcagtacaccaatgggcgtggatagcggtttgactcacggggatttccaagtctccaccccattgacgtcaatgggagtttgttttggcaccaaaatcaacgggactttccaaaatgtcgtaataaccccgccccgttgacgcaaatgggcggtaggcgtgtacggtgggaggtctatataagcagagctcgtttagtgaaccgtc

SEQ ID NO: 18850 - DNA, 370 bp, synthetic construct
  source 1..370: mol_type = other DNA
gcagtacatcaagtgtatcatatgccaagtccgccccctattgacgtcaatgacggtaaatggcccgcctggcattatgcccagtacatgaccttacgggactttcctacttggcagtacatctacgtattagtcatcgctattaccatggtgatgcggttttggcagtacaccaatgggcgtggatagcggtttgactcacggggatttccaagtctccaccccattgacgtcaatgggagtttgttttggcaccaaaatcaacgggactttccaaaatgtcgtaataaccccgccccgttgacgcaaatgggcggtaggcgtgtacggtgggaggtctatataagcagagctcgtttagtgaaccgtc

SEQ ID NO: 18851 - DNA, 369 bp, synthetic construct
  source 1..369: mol_type = other DNA
cagtacatcaagtgtatcatatgccaagtccgccccctattgacgtcaatgacggtaaatggcccgcctggcattatgcccagtacatgaccttacgggactttcctacttggcagtacatctacgtattagtcatcgctattaccatggtgatgcggttttggcagtacaccaatgggcgtggatagcggtttgactcacggggatttccaagtctccaccccattgacgtcaatgggagtttgttttggcaccaaaatcaacgggactttccaaaatgtcgtaataaccccgccccgttgacgcaaatgggcggtaggcgtgtacggtgggaggtctatataagcagagctcgtttagtgaaccgtc

SEQ ID NO: 18852 - DNA, 368 bp, synthetic construct
  source 1..368: mol_type = other DNA
agtacatcaagtgtatcatatgccaagtccgccccctattgacgtcaatgacggtaaatggcccgcctggcattatgcccagtacatgaccttacgggactttcctacttggcagtacatctacgtattagtcatcgctattaccatggtgatgcggttttggcagtacaccaatgggcgtggatagcggtttgactcacggggatttccaagtctccaccccattgacgtcaatgggagtttgttttggcaccaaaatcaacgggactttccaaaatgtcgtaataaccccgccccgttgacgcaaatgggcggtaggcgtgtacggtgggaggtctatataagcagagctcgtttagtgaaccgtc

SEQ ID NO: 18853 - DNA, 367 bp, synthetic construct
  source 1..367: mol_type = other DNA
gtacatcaagtgtatcatatgccaagtccgccccctattgacgtcaatgacggtaaatggcccgcctggcattatgcccagtacatgaccttacgggactttcctacttggcagtacatctacgtattagtcatcgctattaccatggtgatgcggttttggcagtacaccaatgggcgtggatagcggtttgactcacggggatttccaagtctccaccccattgacgtcaatgggagtttgttttggcaccaaaatcaacgggactttccaaaatgtcgtaataaccccgccccgttgacgcaaatgggcggtaggcgtgtacggtgggaggtctatataagcagagctcgtttagtgaaccgtc

SEQ ID NO: 18854 - DNA, 366 bp, synthetic construct
  source 1..366: mol_type = other DNA
tacatcaagtgtatcatatgccaagtccgccccctattgacgtcaatgacggtaaatggcccgcctggcattatgcccagtacatgaccttacgggactttcctacttggcagtacatctacgtattagtcatcgctattaccatggtgatgcggttttggcagtacaccaatgggcgtggatagcggtttgactcacggggatttccaagtctccaccccattgacgtcaatgggagtttgttttggcaccaaaatcaacgggactttccaaaatgtcgtaataaccccgccccgttgacgcaaatgggcggtaggcgtgtacggtgggaggtctatataagcagagctcgtttagtgaaccgtc

SEQ ID NO: 18855 - DNA, 365 bp, synthetic construct
  source 1..365: mol_type = other DNA
acatcaagtgtatcatatgccaagtccgccccctattgacgtcaatgacggtaaatggcccgcctggcattatgcccagtacatgaccttacgggactttcctacttggcagtacatctacgtattagtcatcgctattaccatggtgatgcggttttggcagtacaccaatgggcgtggatagcggtttgactcacggggatttccaagtctccaccccattgacgtcaatgggagtttgttttggcaccaaaatcaacgggactttccaaaatgtcgtaataaccccgccccgttgacgcaaatgggcggtaggcgtgtacggtgggaggtctatataagcagagctcgtttagtgaaccgtc

SEQ ID NO: 18856 - DNA, 364 bp, synthetic construct
  source 1..364: mol_type = other DNA
catcaagtgtatcatatgccaagtccgccccctattgacgtcaatgacggtaaatggcccgcctggcattatgcccagtacatgaccttacgggactttcctacttggcagtacatctacgtattagtcatcgctattaccatggtgatgcggttttggcagtacaccaatgggcgtggatagcggtttgactcacggggatttccaagtctccaccccattgacgtcaatgggagtttgttttggcaccaaaatcaacgggactttccaaaatgtcgtaataaccccgccccgttgacgcaaatgggcggtaggcgtgtacggtgggaggtctatataagcagagctcgtttagtgaaccgtc

SEQ ID NO: 18857 - DNA, 363 bp, synthetic construct
  source 1..363: mol_type = other DNA
atcaagtgtatcatatgccaagtccgccccctattgacgtcaatgacggtaaatggcccgcctggcattatgcccagtacatgaccttacgggactttcctacttggcagtacatctacgtattagtcatcgctattaccatggtgatgcggttttggcagtacaccaatgggcgtggatagcggtttgactcacggggatttccaagtctccaccccattgacgtcaatgggagtttgttttggcaccaaaatcaacgggactttccaaaatgtcgtaataaccccgccccgttgacgcaaatgggcggtaggcgtgtacggtgggaggtctatataagcagagctcgtttagtgaaccgtc

SEQ ID NO: 18858 - DNA, 362 bp, synthetic construct
  source 1..362: mol_type = other DNA
tcaagtgtatcatatgccaagtccgccccctattgacgtcaatgacggtaaatggcccgcctggcattatgcccagtacatgaccttacgggactttcctacttggcagtacatctacgtattagtcatcgctattaccatggtgatgcggttttggcagtacaccaatgggcgtggatagcggtttgactcacggggatttccaagtctccaccccattgacgtcaatgggagtttgttttggcaccaaaatcaacgggactttccaaaatgtcgtaataaccccgccccgttgacgcaaatgggcggtaggcgtgtacggtgggaggtctatataagcagagctcgtttagtgaaccgtc

SEQ ID NO: 18859 - DNA, 361 bp, synthetic construct
  source 1..361: mol_type = other DNA
caagtgtatcatatgccaagtccgccccctattgacgtcaatgacggtaaatggcccgcctggcattatgcccagtacatgaccttacgggactttcctacttggcagtacatctacgtattagtcatcgctattaccatggtgatgcggttttggcagtacaccaatgggcgtggatagcggtttgactcacggggatttccaagtctccaccccattgacgtcaatgggagtttgttttggcaccaaaatcaacgggactttccaaaatgtcgtaataaccccgccccgttgacgcaaatgggcggtaggcgtgtacggtgggaggtctatataagcagagctcgtttagtgaaccgtc

SEQ ID NO: 18860 - DNA, 360 bp, synthetic construct
  source 1..360: mol_type = other DNA
aagtgtatcatatgccaagtccgccccctattgacgtcaatgacggtaaatggcccgcctggcattatgcccagtacatgaccttacgggactttcctacttggcagtacatctacgtattagtcatcgctattaccatggtgatgcggttttggcagtacaccaatgggcgtggatagcggtttgactcacggggatttccaagtctccaccccattgacgtcaatgggagtttgttttggcaccaaaatcaacgggactttccaaaatgtcgtaataaccccgccccgttgacgcaaatgggcggtaggcgtgtacggtgggaggtctatataagcagagctcgtttagtgaaccgtc

SEQ ID NO: 18861 - DNA, 359 bp, synthetic construct
  source 1..359: mol_type = other DNA
agtgtatcatatgccaagtccgccccctattgacgtcaatgacggtaaatggcccgcctggcattatgcccagtacatgaccttacgggactttcctacttggcagtacatctacgtattagtcatcgctattaccatggtgatgcggttttggcagtacaccaatgggcgtggatagcggtttgactcacggggatttccaagtctccaccccattgacgtcaatgggagtttgttttggcaccaaaatcaacgggactttccaaaatgtcgtaataaccccgccccgttgacgcaaatgggcggtaggcgtgtacggtgggaggtctatataagcagagctcgtttagtgaaccgtc

SEQ ID NO: 18862 - DNA, 358 bp, synthetic construct
  source 1..358: mol_type = other DNA
gtgtatcatatgccaagtccgccccctattgacgtcaatgacggtaaatggcccgcctggcattatgcccagtacatgaccttacgggactttcctacttggcagtacatctacgtattagtcatcgctattaccatggtgatgcggttttggcagtacaccaatgggcgtggatagcggtttgactcacggggatttccaagtctccaccccattgacgtcaatgggagtttgttttggcaccaaaatcaacgggactttccaaaatgtcgtaataaccccgccccgttgacgcaaatgggcggtaggcgtgtacggtgggaggtctatataagcagagctcgtttagtgaaccgtc

SEQ ID NO: 18863 - DNA, 357 bp, synthetic construct
  source 1..357: mol_type = other DNA
tgtatcatatgccaagtccgccccctattgacgtcaatgacggtaaatggcccgcctggcattatgcccagtacatgaccttacgggactttcctacttggcagtacatctacgtattagtcatcgctattaccatggtgatgcggttttggcagtacaccaatgggcgtggatagcggtttgactcacggggatttccaagtctccaccccattgacgtcaatgggagtttgttttggcaccaaaatcaacgggactttccaaaatgtcgtaataaccccgccccgttgacgcaaatgggcggtaggcgtgtacggtgggaggtctatataagcagagctcgtttagtgaaccgtc

SEQ ID NO: 18864 - DNA, 356 bp, synthetic construct
  source 1..356: mol_type = other DNA
gtatcatatgccaagtccgccccctattgacgtcaatgacggtaaatggcccgcctggcattatgcccagtacatgaccttacgggactttcctacttggcagtacatctacgtattagtcatcgctattaccatggtgatgcggttttggcagtacaccaatgggcgtggatagcggtttgactcacggggatttccaagtctccaccccattgacgtcaatgggagtttgttttggcaccaaaatcaacgggactttccaaaatgtcgtaataaccccgccccgttgacgcaaatgggcggtaggcgtgtacggtgggaggtctatataagcagagctcgtttagtgaaccgtc

SEQ ID NO: 18865 - DNA, 355 bp, synthetic construct
  source 1..355: mol_type = other DNA
tatcatatgccaagtccgccccctattgacgtcaatgacggtaaatggcccgcctggcattatgcccagtacatgaccttacgggactttcctacttggcagtacatctacgtattagtcatcgctattaccatggtgatgcggttttggcagtacaccaatgggcgtggatagcggtttgactcacggggatttccaagtctccaccccattgacgtcaatgggagtttgttttggcaccaaaatcaacgggactttccaaaatgtcgtaataaccccgccccgttgacgcaaatgggcggtaggcgtgtacggtgggaggtctatataagcagagctcgtttagtgaaccgtc

SEQ ID NO: 18866 - DNA, 354 bp, synthetic construct
  source 1..354: mol_type = other DNA
atcatatgccaagtccgccccctattgacgtcaatgacggtaaatggcccgcctggcattatgcccagtacatgaccttacgggactttcctacttggcagtacatctacgtattagtcatcgctattaccatggtgatgcggttttggcagtacaccaatgggcgtggatagcggtttgactcacggggatttccaagtctccaccccattgacgtcaatgggagtttgttttggcaccaaaatcaacgggactttccaaaatgtcgtaataaccccgccccgttgacgcaaatgggcggtaggcgtgtacggtgggaggtctatataagcagagctcgtttagtgaaccgtc

SEQ ID NO: 18867 - DNA, 353 bp, synthetic construct
  source 1..353: mol_type = other DNA
tcatatgccaagtccgccccctattgacgtcaatgacggtaaatggcccgcctggcattatgcccagtacatgaccttacgggactttcctacttggcagtacatctacgtattagtcatcgctattaccatggtgatgcggttttggcagtacaccaatgggcgtggatagcggtttgactcacggggatttccaagtctccaccccattgacgtcaatgggagtttgttttggcaccaaaatcaacgggactttccaaaatgtcgtaataaccccgccccgttgacgcaaatgggcggtaggcgtgtacggtgggaggtctatataagcagagctcgtttagtgaaccgtc

SEQ ID NO: 18868 - DNA, 352 bp, synthetic construct
  source 1..352: mol_type = other DNA
catatgccaagtccgccccctattgacgtcaatgacggtaaatggcccgcctggcattatgcccagtacatgaccttacgggactttcctacttggcagtacatctacgtattagtcatcgctattaccatggtgatgcggttttggcagtacaccaatgggcgtggatagcggtttgactcacggggatttccaagtctccaccccattgacgtcaatgggagtttgttttggcaccaaaatcaacgggactttccaaaatgtcgtaataaccccgccccgttgacgcaaatgggcggtaggcgtgtacggtgggaggtctatataagcagagctcgtttagtgaaccgtc

SEQ ID NO: 18869 - DNA, 351 bp, synthetic construct
  source 1..351: mol_type = other DNA
atatgccaagtccgccccctattgacgtcaatgacggtaaatggcccgcctggcattatgcccagtacatgaccttacgggactttcctacttggcagtacatctacgtattagtcatcgctattaccatggtgatgcggttttggcagtacaccaatgggcgtggatagcggtttgactcacggggatttccaagtctccaccccattgacgtcaatgggagtttgttttggcaccaaaatcaacgggactttccaaaatgtcgtaataaccccgccccgttgacgcaaatgggcggtaggcgtgtacggtgggaggtctatataagcagagctcgtttagtgaaccgtc

SEQ ID NO: 18870 - DNA, 350 bp, synthetic construct
  source 1..350: mol_type = other DNA
tatgccaagtccgccccctattgacgtcaatgacggtaaatggcccgcctggcattatgcccagtacatgaccttacgggactttcctacttggcagtacatctacgtattagtcatcgctattaccatggtgatgcggttttggcagtacaccaatgggcgtggatagcggtttgactcacggggatttccaagtctccaccccattgacgtcaatgggagtttgttttggcaccaaaatcaacgggactttccaaaatgtcgtaataaccccgccccgttgacgcaaatgggcggtaggcgtgtacggtgggaggtctatataagcagagctcgtttagtgaaccgtc

SEQ ID NO: 18871 - DNA, 349 bp, synthetic construct
  source 1..349: mol_type = other DNA
atgccaagtccgccccctattgacgtcaatgacggtaaatggcccgcctggcattatgcccagtacatgaccttacgggactttcctacttggcagtacatctacgtattagtcatcgctattaccatggtgatgcggttttggcagtacaccaatgggcgtggatagcggtttgactcacggggatttccaagtctccaccccattgacgtcaatgggagtttgttttggcaccaaaatcaacgggactttccaaaatgtcgtaataaccccgccccgttgacgcaaatgggcggtaggcgtgtacggtgggaggtctatataagcagagctcgtttagtgaaccgtc

SEQ ID NO: 18872 - DNA, 348 bp, synthetic construct
  source 1..348: mol_type = other DNA
tgccaagtccgccccctattgacgtcaatgacggtaaatggcccgcctggcattatgcccagtacatgaccttacgggactttcctacttggcagtacatctacgtattagtcatcgctattaccatggtgatgcggttttggcagtacaccaatgggcgtggatagcggtttgactcacggggatttccaagtctccaccccattgacgtcaatgggagtttgttttggcaccaaaatcaacgggactttccaaaatgtcgtaataaccccgccccgttgacgcaaatgggcggtaggcgtgtacggtgggaggtctatataagcagagctcgtttagtgaaccgtc

SEQ ID NO: 18873 - DNA, 347 bp, synthetic construct
  source 1..347: mol_type = other DNA
gccaagtccgccccctattgacgtcaatgacggtaaatggcccgcctggcattatgcccagtacatgaccttacgggactttcctacttggcagtacatctacgtattagtcatcgctattaccatggtgatgcggttttggcagtacaccaatgggcgtggatagcggtttgactcacggggatttccaagtctccaccccattgacgtcaatgggagtttgttttggcaccaaaatcaacgggactttccaaaatgtcgtaataaccccgccccgttgacgcaaatgggcggtaggcgtgtacggtgggaggtctatataagcagagctcgtttagtgaaccgtc

SEQ ID NO: 18874 - DNA, 346 bp, synthetic construct
  source 1..346: mol_type = other DNA
ccaagtccgccccctattgacgtcaatgacggtaaatggcccgcctggcattatgcccagtacatgaccttacgggactttcctacttggcagtacatctacgtattagtcatcgctattaccatggtgatgcggttttggcagtacaccaatgggcgtggatagcggtttgactcacggggatttccaagtctccaccccattgacgtcaatgggagtttgttttggcaccaaaatcaacgggactttccaaaatgtcgtaataaccccgccccgttgacgcaaatgggcggtaggcgtgtacggtgggaggtctatataagcagagctcgtttagtgaaccgtc

SEQ ID NO: 18875 - DNA, 345 bp, synthetic construct
  source 1..345: mol_type = other DNA
caagtccgccccctattgacgtcaatgacggtaaatggcccgcctggcattatgcccagtacatgaccttacgggactttcctacttggcagtacatctacgtattagtcatcgctattaccatggtgatgcggttttggcagtacaccaatgggcgtggatagcggtttgactcacggggatttccaagtctccaccccattgacgtcaatgggagtttgttttggcaccaaaatcaacgggactttccaaaatgtcgtaataaccccgccccgttgacgcaaatgggcggtaggcgtgtacggtgggaggtctatataagcagagctcgtttagtgaaccgtc

SEQ ID NO: 18876 - DNA, 344 bp, synthetic construct
  source 1..344: mol_type = other DNA
aagtccgccccctattgacgtcaatgacggtaaatggcccgcctggcattatgcccagtacatgaccttacgggactttcctacttggcagtacatctacgtattagtcatcgctattaccatggtgatgcggttttggcagtacaccaatgggcgtggatagcggtttgactcacggggatttccaagtctccaccccattgacgtcaatgggagtttgttttggcaccaaaatcaacgggactttccaaaatgtcgtaataaccccgccccgttgacgcaaatgggcggtaggcgtgtacggtgggaggtctatataagcagagctcgtttagtgaaccgtc

SEQ ID NO: 18877 - DNA, 343 bp, synthetic construct
  source 1..343: mol_type = other DNA
agtccgccccctattgacgtcaatgacggtaaatggcccgcctggcattatgcccagtacatgaccttacgggactttcctacttggcagtacatctacgtattagtcatcgctattaccatggtgatgcggttttggcagtacaccaatgggcgtggatagcggtttgactcacggggatttccaagtctccaccccattgacgtcaatgggagtttgttttggcaccaaaatcaacgggactttccaaaatgtcgtaataaccccgccccgttgacgcaaatgggcggtaggcgtgtacggtgggaggtctatataagcagagctcgtttagtgaaccgtc

SEQ ID NO: 18878 - DNA, 342 bp, synthetic construct
  source 1..342: mol_type = other DNA
gtccgccccctattgacgtcaatgacggtaaatggcccgcctggcattatgcccagtacatgaccttacgggactttcctacttggcagtacatctacgtattagtcatcgctattaccatggtgatgcggttttggcagtacaccaatgggcgtggatagcggtttgactcacggggatttccaagtctccaccccattgacgtcaatgggagtttgttttggcaccaaaatcaacgggactttccaaaatgtcgtaataaccccgccccgttgacgcaaatgggcggtaggcgtgtacggtgggaggtctatataagcagagctcgtttagtgaaccgtc

SEQ ID NO: 18879 - DNA, 341 bp, synthetic construct
  source 1..341: mol_type = other DNA
tccgccccctattgacgtcaatgacggtaaatggcccgcctggcattatgcccagtacatgaccttacgggactttcctacttggcagtacatctacgtattagtcatcgctattaccatggtgatgcggttttggcagtacaccaatgggcgtggatagcggtttgactcacggggatttccaagtctccaccccattgacgtcaatgggagtttgttttggcaccaaaatcaacgggactttccaaaatgtcgtaataaccccgccccgttgacgcaaatgggcggtaggcgtgtacggtgggaggtctatataagcagagctcgtttagtgaaccgtc

SEQ ID NO: 18880 - DNA, 340 bp, synthetic construct
  source 1..340: mol_type = other DNA
ccgccccctattgacgtcaatgacggtaaatggcccgcctggcattatgcccagtacatgaccttacgggactttcctacttggcagtacatctacgtattagtcatcgctattaccatggtgatgcggttttggcagtacaccaatgggcgtggatagcggtttgactcacggggatttccaagtctccaccccattgacgtcaatgggagtttgttttggcaccaaaatcaacgggactttccaaaatgtcgtaataaccccgccccgttgacgcaaatgggcggtaggcgtgtacggtgggaggtctatataagcagagctcgtttagtgaaccgtc

SEQ ID NO: 18881 - DNA, 339 bp, synthetic construct
  source 1..339: mol_type = other DNA
cgccccctattgacgtcaatgacggtaaatggcccgcctggcattatgcccagtacatgaccttacgggactttcctacttggcagtacatctacgtattagtcatcgctattaccatggtgatgcggttttggcagtacaccaatgggcgtggatagcggtttgactcacggggatttccaagtctccaccccattgacgtcaatgggagtttgttttggcaccaaaatcaacgggactttccaaaatgtcgtaataaccccgccccgttgacgcaaatgggcggtaggcgtgtacggtgggaggtctatataagcagagctcgtttagtgaaccgtc

SEQ ID NO: 18882 - DNA, 338 bp, synthetic construct
  source 1..338: mol_type = other DNA
gccccctattgacgtcaatgacggtaaatggcccgcctggcattatgcccagtacatgaccttacgggactttcctacttggcagtacatctacgtattagtcatcgctattaccatggtgatgcggttttggcagtacaccaatgggcgtggatagcggtttgactcacggggatttccaagtctccaccccattgacgtcaatgggagtttgttttggcaccaaaatcaacgggactttccaaaatgtcgtaataaccccgccccgttgacgcaaatgggcggtaggcgtgtacggtgggaggtctatataagcagagctcgtttagtgaaccgtc

SEQ ID NO: 18883 - DNA, 337 bp, synthetic construct
  source 1..337: mol_type = other DNA
ccccctattgacgtcaatgacggtaaatggcccgcctggcattatgcccagtacatgaccttacgggactttcctacttggcagtacatctacgtattagtcatcgctattaccatggtgatgcggttttggcagtacaccaatgggcgtggatagcggtttgactcacggggatttccaagtctccaccccattgacgtcaatgggagtttgttttggcaccaaaatcaacgggactttccaaaatgtcgtaataaccccgccccgttgacgcaaatgggcggtaggcgtgtacggtgggaggtctatataagcagagctcgtttagtgaaccgtc

SEQ ID NO: 18884 - DNA, 336 bp, synthetic construct
  source 1..336: mol_type = other DNA
cccctattgacgtcaatgacggtaaatggcccgcctggcattatgcccagtacatgaccttacgggactttcctacttggcagtacatctacgtattagtcatcgctattaccatggtgatgcggttttggcagtacaccaatgggcgtggatagcggtttgactcacggggatttccaagtctccaccccattgacgtcaatgggagtttgttttggcaccaaaatcaacgggactttccaaaatgtcgtaataaccccgccccgttgacgcaaatgggcggtaggcgtgtacggtgggaggtctatataagcagagctcgtttagtgaaccgtc

SEQ ID NO: 18885 - DNA, 335 bp, synthetic construct
  source 1..335: mol_type = other DNA
ccctattgacgtcaatgacggtaaatggcccgcctggcattatgcccagtacatgaccttacgggactttcctacttggcagtacatctacgtattagtcatcgctattaccatggtgatgcggttttggcagtacaccaatgggcgtggatagcggtttgactcacggggatttccaagtctccaccccattgacgtcaatgggagtttgttttggcaccaaaatcaacgggactttccaaaatgtcgtaataaccccgccccgttgacgcaaatgggcggtaggcgtgtacggtgggaggtctatataagcagagctcgtttagtgaaccgtc

SEQ ID NO: 18886 - DNA, 334 bp, synthetic construct
  source 1..334: mol_type = other DNA
cctattgacgtcaatgacggtaaatggcccgcctggcattatgcccagtacatgaccttacgggactttcctacttggcagtacatctacgtattagtcatcgctattaccatggtgatgcggttttggcagtacaccaatgggcgtggatagcggtttgactcacggggatttccaagtctccaccccattgacgtcaatgggagtttgttttggcaccaaaatcaacgggactttccaaaatgtcgtaataaccccgccccgttgacgcaaatgggcggtaggcgtgtacggtgggaggtctatataagcagagctcgtttagtgaaccgtc

SEQ ID NO: 18887 - DNA, 333 bp, synthetic construct
  source 1..333: mol_type = other DNA
ctattgacgtcaatgacggtaaatggcccgcctggcattatgcccagtacatgaccttacgggactttcctacttggcagtacatctacgtattagtcatcgctattaccatggtgatgcggttttggcagtacaccaatgggcgtggatagcggtttgactcacggggatttccaagtctccaccccattgacgtcaatgggagtttgttttggcaccaaaatcaacgggactttccaaaatgtcgtaataaccccgccccgttgacgcaaatgggcggtaggcgtgtacggtgggaggtctatataagcagagctcgtttagtgaaccgtc

SEQ ID NO: 18888 - DNA, 332 bp, synthetic construct
  source 1..332: mol_type = other DNA
tattgacgtcaatgacggtaaatggcccgcctggcattatgcccagtacatgaccttacgggactttcctacttggcagtacatctacgtattagtcatcgctattaccatggtgatgcggttttggcagtacaccaatgggcgtggatagcggtttgactcacggggatttccaagtctccaccccattgacgtcaatgggagtttgttttggcaccaaaatcaacgggactttccaaaatgtcgtaataaccccgccccgttgacgcaaatgggcggtaggcgtgtacggtgggaggtctatataagcagagctcgtttagtgaaccgtc

SEQ ID NO: 18889 - DNA, 331 bp, synthetic construct
  source 1..331: mol_type = other DNA
attgacgtcaatgacggtaaatggcccgcctggcattatgcccagtacatgaccttacgggactttcctacttggcagtacatctacgtattagtcatcgctattaccatggtgatgcggttttggcagtacaccaatgggcgtggatagcggtttgactcacggggatttccaagtctccaccccattgacgtcaatgggagtttgttttggcaccaaaatcaacgggactttccaaaatgtcgtaataaccccgccccgttgacgcaaatgggcggtaggcgtgtacggtgggaggtctatataagcagagctcgtttagtgaaccgtc

SEQ ID NO: 18890 - DNA, 330 bp, synthetic construct
  source 1..330: mol_type = other DNA
ttgacgtcaatgacggtaaatggcccgcctggcattatgcccagtacatgaccttacgggactttcctacttggcagtacatctacgtattagtcatcgctattaccatggtgatgcggttttggcagtacaccaatgggcgtggatagcggtttgactcacggggatttccaagtctccaccccattgacgtcaatgggagtttgttttggcaccaaaatcaacgggactttccaaaatgtcgtaataaccccgccccgttgacgcaaatgggcggtaggcgtgtacggtgggaggtctatataagcagagctcgtttagtgaaccgtc

SEQ ID NO: 18891 - DNA, 329 bp, synthetic construct
  source 1..329: mol_type = other DNA
tgacgtcaatgacggtaaatggcccgcctggcattatgcccagtacatgaccttacgggactttcctacttggcagtacatctacgtattagtcatcgctattaccatggtgatgcggttttggcagtacaccaatgggcgtggatagcggtttgactcacggggatttccaagtctccaccccattgacgtcaatgggagtttgttttggcaccaaaatcaacgggactttccaaaatgtcgtaataaccccgccccgttgacgcaaatgggcggtaggcgtgtacggtgggaggtctatataagcagagctcgtttagtgaaccgtc

SEQ ID NO: 18892 - DNA, 328 bp, synthetic construct
  source 1..328: mol_type = other DNA
gacgtcaatgacggtaaatggcccgcctggcattatgcccagtacatgaccttacgggactttcctacttggcagtacatctacgtattagtcatcgctattaccatggtgatgcggttttggcagtacaccaatgggcgtggatagcggtttgactcacggggatttccaagtctccaccccattgacgtcaatgggagtttgttttggcaccaaaatcaacgggactttccaaaatgtcgtaataaccccgccccgttgacgcaaatgggcggtaggcgtgtacggtgggaggtctatataagcagagctcgtttagtgaaccgtc

SEQ ID NO: 18893 - DNA, 327 bp, synthetic construct
  source 1..327: mol_type = other DNA
acgtcaatgacggtaaatggcccgcctggcattatgcccagtacatgaccttacgggactttcctacttggcagtacatctacgtattagtcatcgctattaccatggtgatgcggttttggcagtacaccaatgggcgtggatagcggtttgactcacggggatttccaagtctccaccccattgacgtcaatgggagtttgttttggcaccaaaatcaacgggactttccaaaatgtcgtaataaccccgccccgttgacgcaaatgggcggtaggcgtgtacggtgggaggtctatataagcagagctcgtttagtgaaccgtc

SEQ ID NO: 18894 - DNA, 326 bp, synthetic construct
  source 1..326: mol_type = other DNA
cgtcaatgacggtaaatggcccgcctggcattatgcccagtacatgaccttacgggactttcctacttggcagtacatctacgtattagtcatcgctattaccatggtgatgcggttttggcagtacaccaatgggcgtggatagcggtttgactcacggggatttccaagtctccaccccattgacgtcaatgggagtttgttttggcaccaaaatcaacgggactttccaaaatgtcgtaataaccccgccccgttgacgcaaatgggcggtaggcgtgtacggtgggaggtctatataagcagagctcgtttagtgaaccgtc

SEQ ID NO: 18895 - DNA, 325 bp, synthetic construct
  source 1..325: mol_type = other DNA
gtcaatgacggtaaatggcccgcctggcattatgcccagtacatgaccttacgggactttcctacttggcagtacatctacgtattagtcatcgctattaccatggtgatgcggttttggcagtacaccaatgggcgtggatagcggtttgactcacggggatttccaagtctccaccccattgacgtcaatgggagtttgttttggcaccaaaatcaacgggactttccaaaatgtcgtaataaccccgccccgttgacgcaaatgggcggtaggcgtgtacggtgggaggtctatataagcagagctcgtttagtgaaccgtc

SEQ ID NO: 18896 - DNA, 324 bp, synthetic construct
  source 1..324: mol_type = other DNA
tcaatgacggtaaatggcccgcctggcattatgcccagtacatgaccttacgggactttcctacttggcagtacatctacgtattagtcatcgctattaccatggtgatgcggttttggcagtacaccaatgggcgtggatagcggtttgactcacggggatttccaagtctccaccccattgacgtcaatgggagtttgttttggcaccaaaatcaacgggactttccaaaatgtcgtaataaccccgccccgttgacgcaaatgggcggtaggcgtgtacggtgggaggtctatataagcagagctcgtttagtgaaccgtc

SEQ ID NO: 18897 - DNA, 323 bp, synthetic construct
  source 1..323: mol_type = other DNA
caatgacggtaaatggcccgcctggcattatgcccagtacatgaccttacgggactttcctacttggcagtacatctacgtattagtcatcgctattaccatggtgatgcggttttggcagtacaccaatgggcgtggatagcggtttgactcacggggatttccaagtctccaccccattgacgtcaatgggagtttgttttggcaccaaaatcaacgggactttccaaaatgtcgtaataaccccgccccgttgacgcaaatgggcggtaggcgtgtacggtgggaggtctatataagcagagctcgtttagtgaaccgtc

SEQ ID NO: 18898 - DNA, 322 bp, synthetic construct
  source 1..322: mol_type = other DNA
aatgacggtaaatggcccgcctggcattatgcccagtacatgaccttacgggactttcctacttggcagtacatctacgtattagtcatcgctattaccatggtgatgcggttttggcagtacaccaatgggcgtggatagcggtttgactcacggggatttccaagtctccaccccattgacgtcaatgggagtttgttttggcaccaaaatcaacgggactttccaaaatgtcgtaataaccccgccccgttgacgcaaatgggcggtaggcgtgtacggtgggaggtctatataagcagagctcgtttagtgaaccgtc

SEQ ID NO: 18899 - DNA, 321 bp, synthetic construct
  source 1..321: mol_type = other DNA
atgacggtaaatggcccgcctggcattatgcccagtacatgaccttacgggactttcctacttggcagtacatctacgtattagtcatcgctattaccatggtgatgcggttttggcagtacaccaatgggcgtggatagcggtttgactcacggggatttccaagtctccaccccattgacgtcaatgggagtttgttttggcaccaaaatcaacgggactttccaaaatgtcgtaataaccccgccccgttgacgcaaatgggcggtaggcgtgtacggtgggaggtctatataagcagagctcgtttagtgaaccgtc

SEQ ID NO: 18900 - DNA, 320 bp, synthetic construct
  source 1..320: mol_type = other DNA
tgacggtaaatggcccgcctggcattatgcccagtacatgaccttacgggactttcctacttggcagtacatctacgtattagtcatcgctattaccatggtgatgcggttttggcagtacaccaatgggcgtggatagcggtttgactcacggggatttccaagtctccaccccattgacgtcaatgggagtttgttttggcaccaaaatcaacgggactttccaaaatgtcgtaataaccccgccccgttgacgcaaatgggcggtaggcgtgtacggtgggaggtctatataagcagagctcgtttagtgaaccgtc

SEQ ID NO: 18901 - DNA, 319 bp, synthetic construct
  source 1..319: mol_type = other DNA
gacggtaaatggcccgcctggcattatgcccagtacatgaccttacgggactttcctacttggcagtacatctacgtattagtcatcgctattaccatggtgatgcggttttggcagtacaccaatgggcgtggatagcggtttgactcacggggatttccaagtctccaccccattgacgtcaatgggagtttgttttggcaccaaaatcaacgggactttccaaaatgtcgtaataaccccgccccgttgacgcaaatgggcggtaggcgtgtacggtgggaggtctatataagcagagctcgtttagtgaaccgtc

SEQ ID NO: 18902 - DNA, 318 bp, synthetic construct
  source 1..318: mol_type = other DNA
acggtaaatggcccgcctggcattatgcccagtacatgaccttacgggactttcctacttggcagtacatctacgtattagtcatcgctattaccatggtgatgcggttttggcagtacaccaatgggcgtggatagcggtttgactcacggggatttccaagtctccaccccattgacgtcaatgggagtttgttttggcaccaaaatcaacgggactttccaaaatgtcgtaataaccccgccccgttgacgcaaatgggcggtaggcgtgtacggtgggaggtctatataagcagagctcgtttagtgaaccgtc

SEQ ID NO: 18903 - DNA, 317 bp, synthetic construct
  source 1..317: mol_type = other DNA
cggtaaatggcccgcctggcattatgcccagtacatgaccttacgggactttcctacttggcagtacatctacgtattagtcatcgctattaccatggtgatgcggttttggcagtacaccaatgggcgtggatagcggtttgactcacggggatttccaagtctccaccccattgacgtcaatgggagtttgttttggcaccaaaatcaacgggactttccaaaatgtcgtaataaccccgccccgttgacgcaaatgggcggtaggcgtgtacggtgggaggtctatataagcagagctcgtttagtgaaccgtc

SEQ ID NO: 18904 - DNA, 316 bp, synthetic construct
  source 1..316: mol_type = other DNA
ggtaaatggcccgcctggcattatgcccagtacatgaccttacgggactttcctacttggcagtacatctacgtattagtcatcgctattaccatggtgatgcggttttggcagtacaccaatgggcgtggatagcggtttgactcacggggatttccaagtctccaccccattgacgtcaatgggagtttgttttggcaccaaaatcaacgggactttccaaaatgtcgtaataaccccgccccgttgacgcaaatgggcggtaggcgtgtacggtgggaggtctatataagcagagctcgtttagtgaaccgtc

SEQ ID NO: 18905 - DNA, 315 bp, synthetic construct
  source 1..315: mol_type = other DNA
gtaaatggcccgcctggcattatgcccagtacatgaccttacgggactttcctacttggcagtacatctacgtattagtcatcgctattaccatggtgatgcggttttggcagtacaccaatgggcgtggatagcggtttgactcacggggatttccaagtctccaccccattgacgtcaatgggagtttgttttggcaccaaaatcaacgggactttccaaaatgtcgtaataaccccgccccgttgacgcaaatgggcggtaggcgtgtacggtgggaggtctatataagcagagctcgtttagtgaaccgtc

SEQ ID NO: 18906 - DNA, 314 bp, synthetic construct
  source 1..314: mol_type = other DNA
taaatggcccgcctggcattatgcccagtacatgaccttacgggactttcctacttggcagtacatctacgtattagtcatcgctattaccatggtgatgcggttttggcagtacaccaatgggcgtggatagcggtttgactcacggggatttccaagtctccaccccattgacgtcaatgggagtttgttttggcaccaaaatcaacgggactttccaaaatgtcgtaataaccccgccccgttgacgcaaatgggcggtaggcgtgtacggtgggaggtctatataagcagagctcgtttagtgaaccgtc

SEQ ID NO: 18907 - DNA, 313 bp, synthetic construct
  source 1..313: mol_type = other DNA
aaatggcccgcctggcattatgcccagtacatgaccttacgggactttcctacttggcagtacatctacgtattagtcatcgctattaccatggtgatgcggttttggcagtacaccaatgggcgtggatagcggtttgactcacggggatttccaagtctccaccccattgacgtcaatgggagtttgttttggcaccaaaatcaacgggactttccaaaatgtcgtaataaccccgccccgttgacgcaaatgggcggtaggcgtgtacggtgggaggtctatataagcagagctcgtttagtgaaccgtc

SEQ ID NO: 18908 - DNA, 312 bp, synthetic construct
  source 1..312: mol_type = other DNA
aatggcccgcctggcattatgcccagtacatgaccttacgggactttcctacttggcagtacatctacgtattagtcatcgctattaccatggtgatgcggttttggcagtacaccaatgggcgtggatagcggtttgactcacggggatttccaagtctccaccccattgacgtcaatgggagtttgttttggcaccaaaatcaacgggactttccaaaatgtcgtaataaccccgccccgttgacgcaaatgggcggtaggcgtgtacggtgggaggtctatataagcagagctcgtttagtgaaccgtc

SEQ ID NO: 18909 - DNA, 311 bp, synthetic construct
  source 1..311: mol_type = other DNA
atggcccgcctggcattatgcccagtacatgaccttacgggactttcctacttggcagtacatctacgtattagtcatcgctattaccatggtgatgcggttttggcagtacaccaatgggcgtggatagcggtttgactcacggggatttccaagtctccaccccattgacgtcaatgggagtttgttttggcaccaaaatcaacgggactttccaaaatgtcgtaataaccccgccccgttgacgcaaatgggcggtaggcgtgtacggtgggaggtctatataagcagagctcgtttagtgaaccgtc

SEQ ID NO: 18910 - DNA, 310 bp, synthetic construct
  source 1..310: mol_type = other DNA
tggcccgcctggcattatgcccagtacatgaccttacgggactttcctacttggcagtacatctacgtattagtcatcgctattaccatggtgatgcggttttggcagtacaccaatgggcgtggatagcggtttgactcacggggatttccaagtctccaccccattgacgtcaatgggagtttgttttggcaccaaaatcaacgggactttccaaaatgtcgtaataaccccgccccgttgacgcaaatgggcggtaggcgtgtacggtgggaggtctatataagcagagctcgtttagtgaaccgtc

SEQ ID NO: 18911 - DNA, 309 bp, synthetic construct
  source 1..309: mol_type = other DNA
ggcccgcctggcattatgcccagtacatgaccttacgggactttcctacttggcagtacatctacgtattagtcatcgctattaccatggtgatgcggttttggcagtacaccaatgggcgtggatagcggtttgactcacggggatttccaagtctccaccccattgacgtcaatgggagtttgttttggcaccaaaatcaacgggactttccaaaatgtcgtaataaccccgccccgttgacgcaaatgggcggtaggcgtgtacggtgggaggtctatataagcagagctcgtttagtgaaccgtc

SEQ ID NO: 18912 - DNA, 308 bp, synthetic construct
  source 1..308: mol_type = other DNA
gcccgcctggcattatgcccagtacatgaccttacgggactttcctacttggcagtacatctacgtattagtcatcgctattaccatggtgatgcggttttggcagtacaccaatgggcgtggatagcggtttgactcacggggatttccaagtctccaccccattgacgtcaatgggagtttgttttggcaccaaaatcaacgggactttccaaaatgtcgtaataaccccgccccgttgacgcaaatgggcggtaggcgtgtacggtgggaggtctatataagcagagctcgtttagtgaaccgtc

SEQ ID NO: 18913 - DNA, 307 bp, synthetic construct
  source 1..307: mol_type = other DNA
cccgcctggcattatgcccagtacatgaccttacgggactttcctacttggcagtacatctacgtattagtcatcgctattaccatggtgatgcggttttggcagtacaccaatgggcgtggatagcggtttgactcacggggatttccaagtctccaccccattgacgtcaatgggagtttgttttggcaccaaaatcaacgggactttccaaaatgtcgtaataaccccgccccgttgacgcaaatgggcggtaggcgtgtacggtgggaggtctatataagcagagctcgtttagtgaaccgtc

SEQ ID NO: 18914 - DNA, 306 bp, synthetic construct
  source 1..306: mol_type = other DNA
ccgcctggcattatgcccagtacatgaccttacgggactttcctacttggcagtacatctacgtattagtcatcgctattaccatggtgatgcggttttggcagtacaccaatgggcgtggatagcggtttgactcacggggatttccaagtctccaccccattgacgtcaatgggagtttgttttggcaccaaaatcaacgggactttccaaaatgtcgtaataaccccgccccgttgacgcaaatgggcggtaggcgtgtacggtgggaggtctatataagcagagctcgtttagtgaaccgtc

SEQ ID NO: 18915 - DNA, 305 bp, synthetic construct
  source 1..305: mol_type = other DNA
cgcctggcattatgcccagtacatgaccttacgggactttcctacttggcagtacatctacgtattagtcatcgctattaccatggtgatgcggttttggcagtacaccaatgggcgtggatagcggtttgactcacggggatttccaagtctccaccccattgacgtcaatgggagtttgttttggcaccaaaatcaacgggactttccaaaatgtcgtaataaccccgccccgttgacgcaaatgggcggtaggcgtgtacggtgggaggtctatataagcagagctcgtttagtgaaccgtc

SEQ ID NO: 18916 - DNA, 304 bp, synthetic construct
  source 1..304: mol_type = other DNA
gcctggcattatgcccagtacatgaccttacgggactttcctacttggcagtacatctacgtattagtcatcgctattaccatggtgatgcggttttggcagtacaccaatgggcgtggatagcggtttgactcacggggatttccaagtctccaccccattgacgtcaatgggagtttgttttggcaccaaaatcaacgggactttccaaaatgtcgtaataaccccgccccgttgacgcaaatgggcggtaggcgtgtacggtgggaggtctatataagcagagctcgtttagtgaaccgtc

SEQ ID NO: 18917 - DNA, 303 bp, synthetic construct
  source 1..303: mol_type = other DNA
cctggcattatgcccagtacatgaccttacgggactttcctacttggcagtacatctacgtattagtcatcgctattaccatggtgatgcggttttggcagtacaccaatgggcgtggatagcggtttgactcacggggatttccaagtctccaccccattgacgtcaatgggagtttgttttggcaccaaaatcaacgggactttccaaaatgtcgtaataaccccgccccgttgacgcaaatgggcggtaggcgtgtacggtgggaggtctatataagcagagctcgtttagtgaaccgtc

SEQ ID NO: 18918 - DNA, 302 bp, synthetic construct
  source 1..302: mol_type = other DNA
ctggcattatgcccagtacatgaccttacgggactttcctacttggcagtacatctacgtattagtcatcgctattaccatggtgatgcggttttggcagtacaccaatgggcgtggatagcggtttgactcacggggatttccaagtctccaccccattgacgtcaatgggagtttgttttggcaccaaaatcaacgggactttccaaaatgtcgtaataaccccgccccgttgacgcaaatgggcggtaggcgtgtacggtgggaggtctatataagcagagctcgtttagtgaaccgtc

SEQ ID NO: 18919 - DNA, 301 bp, synthetic construct
  source 1..301: mol_type = other DNA
tggcattatgcccagtacatgaccttacgggactttcctacttggcagtacatctacgtattagtcatcgctattaccatggtgatgcggttttggcagtacaccaatgggcgtggatagcggtttgactcacggggatttccaagtctccaccccattgacgtcaatgggagtttgttttggcaccaaaatcaacgggactttccaaaatgtcgtaataaccccgccccgttgacgcaaatgggcggtaggcgtgtacggtgggaggtctatataagcagagctcgtttagtgaaccgtc

SEQ ID NO: 18920 - DNA, 300 bp, synthetic construct
  source 1..300: mol_type = other DNA
ggcattatgcccagtacatgaccttacgggactttcctacttggcagtacatctacgtattagtcatcgctattaccatggtgatgcggttttggcagtacaccaatgggcgtggatagcggtttgactcacggggatttccaagtctccaccccattgacgtcaatgggagtttgttttggcaccaaaatcaacgggactttccaaaatgtcgtaataaccccgccccgttgacgcaaatgggcggtaggcgtgtacggtgggaggtctatataagcagagctcgtttagtgaaccgtc

SEQ ID NO: 18921 - DNA, 299 bp, synthetic construct
  source 1..299: mol_type = other DNA
gcattatgcccagtacatgaccttacgggactttcctacttggcagtacatctacgtattagtcatcgctattaccatggtgatgcggttttggcagtacaccaatgggcgtggatagcggtttgactcacggggatttccaagtctccaccccattgacgtcaatgggagtttgttttggcaccaaaatcaacgggactttccaaaatgtcgtaataaccccgccccgttgacgcaaatgggcggtaggcgtgtacggtgggaggtctatataagcagagctcgtttagtgaaccgtc

SEQ ID NO: 18922 - DNA, 298 bp, synthetic construct
  source 1..298: mol_type = other DNA
cattatgcccagtacatgaccttacgggactttcctacttggcagtacatctacgtattagtcatcgctattaccatggtgatgcggttttggcagtacaccaatgggcgtggatagcggtttgactcacggggatttccaagtctccaccccattgacgtcaatgggagtttgttttggcaccaaaatcaacgggactttccaaaatgtcgtaataaccccgccccgttgacgcaaatgggcggtaggcgtgtacggtgggaggtctatataagcagagctcgtttagtgaaccgtc

SEQ ID NO: 18923 - DNA, 297 bp, synthetic construct
  source 1..297: mol_type = other DNA
attatgcccagtacatgaccttacgggactttcctacttggcagtacatctacgtattagtcatcgctattaccatggtgatgcggttttggcagtacaccaatgggcgtggatagcggtttgactcacggggatttccaagtctccaccccattgacgtcaatgggagtttgttttggcaccaaaatcaacgggactttccaaaatgtcgtaataaccccgccccgttgacgcaaatgggcggtaggcgtgtacggtgggaggtctatataagcagagctcgtttagtgaaccgtc

SEQ ID NO: 18924 - DNA, 296 bp, synthetic construct
  source 1..296: mol_type = other DNA
ttatgcccagtacatgaccttacgggactttcctacttggcagtacatctacgtattagtcatcgctattaccatggtgatgcggttttggcagtacaccaatgggcgtggatagcggtttgactcacggggatttccaagtctccaccccattgacgtcaatgggagtttgttttggcaccaaaatcaacgggactttccaaaatgtcgtaataaccccgccccgttgacgcaaatgggcggtaggcgtgtacggtgggaggtctatataagcagagctcgtttagtgaaccgtc

SEQ ID NO: 18925 - DNA, 295 bp, synthetic construct
  source 1..295: mol_type = other DNA
tatgcccagtacatgaccttacgggactttcctacttggcagtacatctacgtattagtcatcgctattaccatggtgatgcggttttggcagtacaccaatgggcgtggatagcggtttgactcacggggatttccaagtctccaccccattgacgtcaatgggagtttgttttggcaccaaaatcaacgggactttccaaaatgtcgtaataaccccgccccgttgacgcaaatgggcggtaggcgtgtacggtgggaggtctatataagcagagctcgtttagtgaaccgtc

SEQ ID NO: 18926 - DNA, 294 bp, synthetic construct
  source 1..294: mol_type = other DNA
atgcccagtacatgaccttacgggactttcctacttggcagtacatctacgtattagtcatcgctattaccatggtgatgcggttttggcagtacaccaatgggcgtggatagcggtttgactcacggggatttccaagtctccaccccattgacgtcaatgggagtttgttttggcaccaaaatcaacgggactttccaaaatgtcgtaataaccccgccccgttgacgcaaatgggcggtaggcgtgtacggtgggaggtctatataagcagagctcgtttagtgaaccgtc

SEQ ID NO: 18927 - DNA, 293 bp, synthetic construct
  source 1..293: mol_type = other DNA
tgcccagtacatgaccttacgggactttcctacttggcagtacatctacgtattagtcatcgctattaccatggtgatgcggttttggcagtacaccaatgggcgtggatagcggtttgactcacggggatttccaagtctccaccccattgacgtcaatgggagtttgttttggcaccaaaatcaacgggactttccaaaatgtcgtaataaccccgccccgttgacgcaaatgggcggtaggcgtgtacggtgggaggtctatataagcagagctcgtttagtgaaccgtc

SEQ ID NO: 18928 - DNA, 292 bp, synthetic construct
  source 1..292: mol_type = other DNA
gcccagtacatgaccttacgggactttcctacttggcagtacatctacgtattagtcatcgctattaccatggtgatgcggttttggcagtacaccaatgggcgtggatagcggtttgactcacggggatttccaagtctccaccccattgacgtcaatgggagtttgttttggcaccaaaatcaacgggactttccaaaatgtcgtaataaccccgccccgttgacgcaaatgggcggtaggcgtgtacggtgggaggtctatataagcagagctcgtttagtgaaccgtc

SEQ ID NO: 18929 - DNA, 291 bp, synthetic construct
  source 1..291: mol_type = other DNA
cccagtacatgaccttacgggactttcctacttggcagtacatctacgtattagtcatcgctattaccatggtgatgcggttttggcagtacaccaatgggcgtggatagcggtttgactcacggggatttccaagtctccaccccattgacgtcaatgggagtttgttttggcaccaaaatcaacgggactttccaaaatgtcgtaataaccccgccccgttgacgcaaatgggcggtaggcgtgtacggtgggaggtctatataagcagagctcgtttagtgaaccgtc

SEQ ID NO: 18930 - DNA, 290 bp, synthetic construct
  source 1..290: mol_type = other DNA
ccagtacatgaccttacgggactttcctacttggcagtacatctacgtattagtcatcgctattaccatggtgatgcggttttggcagtacaccaatgggcgtggatagcggtttgactcacggggatttccaagtctccaccccattgacgtcaatgggagtttgttttggcaccaaaatcaacgggactttccaaaatgtcgtaataaccccgccccgttgacgcaaatgggcggtaggcgtgtacggtgggaggtctatataagcagagctcgtttagtgaaccgtc

SEQ ID NO: 18931 - DNA, 289 bp, synthetic construct
  source 1..289: mol_type = other DNA
cagtacatgaccttacgggactttcctacttggcagtacatctacgtattagtcatcgctattaccatggtgatgcggttttggcagtacaccaatgggcgtggatagcggtttgactcacggggatttccaagtctccaccccattgacgtcaatgggagtttgttttggcaccaaaatcaacgggactttccaaaatgtcgtaataaccccgccccgttgacgcaaatgggcggtaggcgtgtacggtgggaggtctatataagcagagctcgtttagtgaaccgtc

SEQ ID NO: 18932 - DNA, 288 bp, synthetic construct
  source 1..288: mol_type = other DNA
agtacatgaccttacgggactttcctacttggcagtacatctacgtattagtcatcgctattaccatggtgatgcggttttggcagtacaccaatgggcgtggatagcggtttgactcacggggatttccaagtctccaccccattgacgtcaatgggagtttgttttggcaccaaaatcaacgggactttccaaaatgtcgtaataaccccgccccgttgacgcaaatgggcggtaggcgtgtacggtgggaggtctatataagcagagctcgtttagtgaaccgtc

SEQ ID NO: 18933 - DNA, 287 bp, synthetic construct
  source 1..287: mol_type = other DNA
gtacatgaccttacgggactttcctacttggcagtacatctacgtattagtcatcgctattaccatggtgatgcggttttggcagtacaccaatgggcgtggatagcggtttgactcacggggatttccaagtctccaccccattgacgtcaatgggagtttgttttggcaccaaaatcaacgggactttccaaaatgtcgtaataaccccgccccgttgacgcaaatgggcggtaggcgtgtacggtgggaggtctatataagcagagctcgtttagtgaaccgtc

SEQ ID NO: 18934 - DNA, 286 bp, synthetic construct
  source 1..286: mol_type = other DNA
tacatgaccttacgggactttcctacttggcagtacatctacgtattagtcatcgctattaccatggtgatgcggttttggcagtacaccaatgggcgtggatagcggtttgactcacggggatttccaagtctccaccccattgacgtcaatgggagtttgttttggcaccaaaatcaacgggactttccaaaatgtcgtaataaccccgccccgttgacgcaaatgggcggtaggcgtgtacggtgggaggtctatataagcagagctcgtttagtgaaccgtc

SEQ ID NO: 18935 - DNA, 285 bp, synthetic construct
  source 1..285: mol_type = other DNA
acatgaccttacgggactttcctacttggcagtacatctacgtattagtcatcgctattaccatggtgatgcggttttggcagtacaccaatgggcgtggatagcggtttgactcacggggatttccaagtctccaccccattgacgtcaatgggagtttgttttggcaccaaaatcaacgggactttccaaaatgtcgtaataaccccgccccgttgacgcaaatgggcggtaggcgtgtacggtgggaggtctatataagcagagctcgtttagtgaaccgtc

SEQ ID NO: 18936 - DNA, 284 bp, synthetic construct
  source 1..284: mol_type = other DNA
catgaccttacgggactttcctacttggcagtacatctacgtattagtcatcgctattaccatggtgatgcggttttggcagtacaccaatgggcgtggatagcggtttgactcacggggatttccaagtctccaccccattgacgtcaatgggagtttgttttggcaccaaaatcaacgggactttccaaaatgtcgtaataaccccgccccgttgacgcaaatgggcggtaggcgtgtacggtgggaggtctatataagcagagctcgtttagtgaaccgtc

SEQ ID NO: 18937 - DNA, 283 bp, synthetic construct
  source 1..283: mol_type = other DNA
atgaccttacgggactttcctacttggcagtacatctacgtattagtcatcgctattaccatggtgatgcggttttggcagtacaccaatgggcgtggatagcggtttgactcacggggatttccaagtctccaccccattgacgtcaatgggagtttgttttggcaccaaaatcaacgggactttccaaaatgtcgtaataaccccgccccgttgacgcaaatgggcggtaggcgtgtacggtgggaggtctatataagcagagctcgtttagtgaaccgtc

SEQ ID NO: 18938 - DNA, 282 bp, synthetic construct
  source 1..282: mol_type = other DNA
tgaccttacgggactttcctacttggcagtacatctacgtattagtcatcgctattaccatggtgatgcggttttggcagtacaccaatgggcgtggatagcggtttgactcacggggatttccaagtctccaccccattgacgtcaatgggagtttgttttggcaccaaaatcaacgggactttccaaaatgtcgtaataaccccgccccgttgacgcaaatgggcggtaggcgtgtacggtgggaggtctatataagcagagctcgtttagtgaaccgtc

SEQ ID NO: 18939 - DNA, 281 bp, synthetic construct
  source 1..281: mol_type = other DNA
gaccttacgggactttcctacttggcagtacatctacgtattagtcatcgctattaccatggtgatgcggttttggcagtacaccaatgggcgtggatagcggtttgactcacggggatttccaagtctccaccccattgacgtcaatgggagtttgttttggcaccaaaatcaacgggactttccaaaatgtcgtaataaccccgccccgttgacgcaaatgggcggtaggcgtgtacggtgggaggtctatataagcagagctcgtttagtgaaccgtc

SEQ ID NO: 18940 - DNA, 280 bp, synthetic construct
  source 1..280: mol_type = other DNA
accttacgggactttcctacttggcagtacatctacgtattagtcatcgctattaccatggtgatgcggttttggcagtacaccaatgggcgtggatagcggtttgactcacggggatttccaagtctccaccccattgacgtcaatgggagtttgttttggcaccaaaatcaacgggactttccaaaatgtcgtaataaccccgccccgttgacgcaaatgggcggtaggcgtgtacggtgggaggtctatataagcagagctcgtttagtgaaccgtc

SEQ ID NO: 18941 - DNA, 279 bp, synthetic construct
  source 1..279: mol_type = other DNA
ccttacgggactttcctacttggcagtacatctacgtattagtcatcgctattaccatggtgatgcggttttggcagtacaccaatgggcgtggatagcggtttgactcacggggatttccaagtctccaccccattgacgtcaatgggagtttgttttggcaccaaaatcaacgggactttccaaaatgtcgtaataaccccgccccgttgacgcaaatgggcggtaggcgtgtacggtgggaggtctatataagcagagctcgtttagtgaaccgtc

SEQ ID NO: 18942 - DNA, 278 bp, synthetic construct
  source 1..278: mol_type = other DNA
cttacgggactttcctacttggcagtacatctacgtattagtcatcgctattaccatggtgatgcggttttggcagtacaccaatgggcgtggatagcggtttgactcacggggatttccaagtctccaccccattgacgtcaatgggagtttgttttggcaccaaaatcaacgggactttccaaaatgtcgtaataaccccgccccgttgacgcaaatgggcggtaggcgtgtacggtgggaggtctatataagcagagctcgtttagtgaaccgtc

SEQ ID NO: 18943 - DNA, 277 bp, synthetic construct
  source 1..277: mol_type = other DNA
ttacgggactttcctacttggcagtacatctacgtattagtcatcgctattaccatggtgatgcggttttggcagtacaccaatgggcgtggatagcggtttgactcacggggatttccaagtctccaccccattgacgtcaatgggagtttgttttggcaccaaaatcaacgggactttccaaaatgtcgtaataaccccgccccgttgacgcaaatgggcggtaggcgtgtacggtgggaggtctatataagcagagctcgtttagtgaaccgtc

SEQ ID NO: 18944 - DNA, 276 bp, synthetic construct
  source 1..276: mol_type = other DNA
tacgggactttcctacttggcagtacatctacgtattagtcatcgctattaccatggtgatgcggttttggcagtacaccaatgggcgtggatagcggtttgactcacggggatttccaagtctccaccccattgacgtcaatgggagtttgttttggcaccaaaatcaacgggactttccaaaatgtcgtaataaccccgccccgttgacgcaaatgggcggtaggcgtgtacggtgggaggtctatataagcagagctcgtttagtgaaccgtc

SEQ ID NO: 18945 - DNA, 275 bp, synthetic construct
  source 1..275: mol_type = other DNA
acgggactttcctacttggcagtacatctacgtattagtcatcgctattaccatggtgatgcggttttggcagtacaccaatgggcgtggatagcggtttgactcacggggatttccaagtctccaccccattgacgtcaatgggagtttgttttggcaccaaaatcaacgggactttccaaaatgtcgtaataaccccgccccgttgacgcaaatgggcggtaggcgtgtacggtgggaggtctatataagcagagctcgtttagtgaaccgtc

SEQ ID NO: 18946 - DNA, 274 bp, synthetic construct
  source 1..274: mol_type = other DNA
cgggactttcctacttggcagtacatctacgtattagtcatcgctattaccatggtgatgcggttttggcagtacaccaatgggcgtggatagcggtttgactcacggggatttccaagtctccaccccattgacgtcaatgggagtttgttttggcaccaaaatcaacgggactttccaaaatgtcgtaataaccccgccccgttgacgcaaatgggcggtaggcgtgtacggtgggaggtctatataagcagagctcgtttagtgaaccgtc

SEQ ID NO: 18947 - DNA, 273 bp, synthetic construct
  source 1..273: mol_type = other DNA
gggactttcctacttggcagtacatctacgtattagtcatcgctattaccatggtgatgcggttttggcagtacaccaatgggcgtggatagcggtttgactcacggggatttccaagtctccaccccattgacgtcaatgggagtttgttttggcaccaaaatcaacgggactttccaaaatgtcgtaataaccccgccccgttgacgcaaatgggcggtaggcgtgtacggtgggaggtctatataagcagagctcgtttagtgaaccgtc

SEQ ID NO: 18948 - DNA, 272 bp, synthetic construct
  source 1..272: mol_type = other DNA
ggactttcctacttggcagtacatctacgtattagtcatcgctattaccatggtgatgcggttttggcagtacaccaatgggcgtggatagcggtttgactcacggggatttccaagtctccaccccattgacgtcaatgggagtttgttttggcaccaaaatcaacgggactttccaaaatgtcgtaataaccccgccccgttgacgcaaatgggcggtaggcgtgtacggtgggaggtctatataagcagagctcgtttagtgaaccgtc

SEQ ID NO: 18949 - DNA, 271 bp, synthetic construct
  source 1..271: mol_type = other DNA
gactttcctacttggcagtacatctacgtattagtcatcgctattaccatggtgatgcggttttggcagtacaccaatgggcgtggatagcggtttgactcacggggatttccaagtctccaccccattgacgtcaatgggagtttgttttggcaccaaaatcaacgggactttccaaaatgtcgtaataaccccgccccgttgacgcaaatgggcggtaggcgtgtacggtgggaggtctatataagcagagctcgtttagtgaaccgtc

SEQ ID NO: 18950 - DNA, 270 bp, synthetic construct
  source 1..270: mol_type = other DNA
actttcctacttggcagtacatctacgtattagtcatcgctattaccatggtgatgcggttttggcagtacaccaatgggcgtggatagcggtttgactcacggggatttccaagtctccaccccattgacgtcaatgggagtttgttttggcaccaaaatcaacgggactttccaaaatgtcgtaataaccccgccccgttgacgcaaatgggcggtaggcgtgtacggtgggaggtctatataagcagagctcgtttagtgaaccgtc

SEQ ID NO: 18951 - DNA, 269 bp, synthetic construct
  source 1..269: mol_type = other DNA
ctttcctacttggcagtacatctacgtattagtcatcgctattaccatggtgatgcggttttggcagtacaccaatgggcgtggatagcggtttgactcacggggatttccaagtctccaccccattgacgtcaatgggagtttgttttggcaccaaaatcaacgggactttccaaaatgtcgtaataaccccgccccgttgacgcaaatgggcggtaggcgtgtacggtgggaggtctatataagcagagctcgtttagtgaaccgtc

SEQ ID NO: 18952 - DNA, 268 bp, synthetic construct
  source 1..268: mol_type = other DNA
tttcctacttggcagtacatctacgtattagtcatcgctattaccatggtgatgcggttttggcagtacaccaatgggcgtggatagcggtttgactcacggggatttccaagtctccaccccattgacgtcaatgggagtttgttttggcaccaaaatcaacgggactttccaaaatgtcgtaataaccccgccccgttgacgcaaatgggcggtaggcgtgtacggtgggaggtctatataagcagagctcgtttagtgaaccgtc

SEQ ID NO: 18953 - DNA, 267 bp, synthetic construct
  source 1..267: mol_type = other DNA
ttcctacttggcagtacatctacgtattagtcatcgctattaccatggtgatgcggttttggcagtacaccaatgggcgtggatagcggtttgactcacggggatttccaagtctccaccccattgacgtcaatgggagtttgttttggcaccaaaatcaacgggactttccaaaatgtcgtaataaccccgccccgttgacgcaaatgggcggtaggcgtgtacggtgggaggtctatataagcagagctcgtttagtgaaccgtc

SEQ ID NO: 18954 - DNA, 266 bp, synthetic construct
  source 1..266: mol_type = other DNA
tcctacttggcagtacatctacgtattagtcatcgctattaccatggtgatgcggttttggcagtacaccaatgggcgtggatagcggtttgactcacggggatttccaagtctccaccccattgacgtcaatgggagtttgttttggcaccaaaatcaacgggactttccaaaatgtcgtaataaccccgccccgttgacgcaaatgggcggtaggcgtgtacggtgggaggtctatataagcagagctcgtttagtgaaccgtc

SEQ ID NO: 18955 - DNA, 265 bp, synthetic construct
  source 1..265: mol_type = other DNA
cctacttggcagtacatctacgtattagtcatcgctattaccatggtgatgcggttttggcagtacaccaatgggcgtggatagcggtttgactcacggggatttccaagtctccaccccattgacgtcaatgggagtttgttttggcaccaaaatcaacgggactttccaaaatgtcgtaataaccccgccccgttgacgcaaatgggcggtaggcgtgtacggtgggaggtctatataagcagagctcgtttagtgaaccgtc

SEQ ID NO: 18956 - DNA, 264 bp, synthetic construct
  source 1..264: mol_type = other DNA
ctacttggcagtacatctacgtattagtcatcgctattaccatggtgatgcggttttggcagtacaccaatgggcgtggatagcggtttgactcacggggatttccaagtctccaccccattgacgtcaatgggagtttgttttggcaccaaaatcaacgggactttccaaaatgtcgtaataaccccgccccgttgacgcaaatgggcggtaggcgtgtacggtgggaggtctatataagcagagctcgtttagtgaaccgtc

SEQ ID NO: 18957 - DNA, 263 bp, synthetic construct
  source 1..263: mol_type = other DNA
tacttggcagtacatctacgtattagtcatcgctattaccatggtgatgcggttttggcagtacaccaatgggcgtggatagcggtttgactcacggggatttccaagtctccaccccattgacgtcaatgggagtttgttttggcaccaaaatcaacgggactttccaaaatgtcgtaataaccccgccccgttgacgcaaatgggcggtaggcgtgtacggtgggaggtctatataagcagagctcgtttagtgaaccgtc

SEQ ID NO: 18958 - DNA, 262 bp, synthetic construct
  source 1..262: mol_type = other DNA
acttggcagtacatctacgtattagtcatcgctattaccatggtgatgcggttttggcagtacaccaatgggcgtggatagcggtttgactcacggggatttccaagtctccaccccattgacgtcaatgggagtttgttttggcaccaaaatcaacgggactttccaaaatgtcgtaataaccccgccccgttgacgcaaatgggcggtaggcgtgtacggtgggaggtctatataagcagagctcgtttagtgaaccgtc

SEQ ID NO: 18959 - DNA, 261 bp, synthetic construct
  source 1..261: mol_type = other DNA
cttggcagtacatctacgtattagtcatcgctattaccatggtgatgcggttttggcagtacaccaatgggcgtggatagcggtttgactcacggggatttccaagtctccaccccattgacgtcaatgggagtttgttttggcaccaaaatcaacgggactttccaaaatgtcgtaataaccccgccccgttgacgcaaatgggcggtaggcgtgtacggtgggaggtctatataagcagagctcgtttagtgaaccgtc

SEQ ID NO: 18960 - DNA, 260 bp, synthetic construct
  source 1..260: mol_type = other DNA
ttggcagtacatctacgtattagtcatcgctattaccatggtgatgcggttttggcagtacaccaatgggcgtggatagcggtttgactcacggggatttccaagtctccaccccattgacgtcaatgggagtttgttttggcaccaaaatcaacgggactttccaaaatgtcgtaataaccccgccccgttgacgcaaatgggcggtaggcgtgtacggtgggaggtctatataagcagagctcgtttagtgaaccgtc

SEQ ID NO: 18961 - DNA, 259 bp, synthetic construct
  source 1..259: mol_type = other DNA
tggcagtacatctacgtattagtcatcgctattaccatggtgatgcggttttggcagtacaccaatgggcgtggatagcggtttgactcacggggatttccaagtctccaccccattgacgtcaatgggagtttgttttggcaccaaaatcaacgggactttccaaaatgtcgtaataaccccgccccgttgacgcaaatgggcggtaggcgtgtacggtgggaggtctatataagcagagctcgtttagtgaaccgtc

SEQ ID NO: 18962 - DNA, 258 bp, synthetic construct
  source 1..258: mol_type = other DNA
ggcagtacatctacgtattagtcatcgctattaccatggtgatgcggttttggcagtacaccaatgggcgtggatagcggtttgactcacggggatttccaagtctccaccccattgacgtcaatgggagtttgttttggcaccaaaatcaacgggactttccaaaatgtcgtaataaccccgccccgttgacgcaaatgggcggtaggcgtgtacggtgggaggtctatataagcagagctcgtttagtgaaccgtc

SEQ ID NO: 18963 - DNA, 257 bp, synthetic construct
  source 1..257: mol_type = other DNA
gcagtacatctacgtattagtcatcgctattaccatggtgatgcggttttggcagtacaccaatgggcgtggatagcggtttgactcacggggatttccaagtctccaccccattgacgtcaatgggagtttgttttggcaccaaaatcaacgggactttccaaaatgtcgtaataaccccgccccgttgacgcaaatgggcggtaggcgtgtacggtgggaggtctatataagcagagctcgtttagtgaaccgtc

SEQ ID NO: 18964 - DNA, 256 bp, synthetic construct
  source 1..256: mol_type = other DNA
cagtacatctacgtattagtcatcgctattaccatggtgatgcggttttggcagtacaccaatgggcgtggatagcggtttgactcacggggatttccaagtctccaccccattgacgtcaatgggagtttgttttggcaccaaaatcaacgggactttccaaaatgtcgtaataaccccgccccgttgacgcaaatgggcggtaggcgtgtacggtgggaggtctatataagcagagctcgtttagtgaaccgtc

SEQ ID NO: 18965 - DNA, 255 bp, synthetic construct
  source 1..255: mol_type = other DNA
agtacatctacgtattagtcatcgctattaccatggtgatgcggttttggcagtacaccaatgggcgtggatagcggtttgactcacggggatttccaagtctccaccccattgacgtcaatgggagtttgttttggcaccaaaatcaacgggactttccaaaatgtcgtaataaccccgccccgttgacgcaaatgggcggtaggcgtgtacggtgggaggtctatataagcagagctcgtttagtgaaccgtc

SEQ ID NO: 18966 - DNA, 254 bp, synthetic construct
  source 1..254: mol_type = other DNA
gtacatctacgtattagtcatcgctattaccatggtgatgcggttttggcagtacaccaatgggcgtggatagcggtttgactcacggggatttccaagtctccaccccattgacgtcaatgggagtttgttttggcaccaaaatcaacgggactttccaaaatgtcgtaataaccccgccccgttgacgcaaatgggcggtaggcgtgtacggtgggaggtctatataagcagagctcgtttagtgaaccgtc

SEQ ID NO: 18967 - DNA, 253 bp, synthetic construct
  source 1..253: mol_type = other DNA
tacatctacgtattagtcatcgctattaccatggtgatgcggttttggcagtacaccaatgggcgtggatagcggtttgactcacggggatttccaagtctccaccccattgacgtcaatgggagtttgttttggcaccaaaatcaacgggactttccaaaatgtcgtaataaccccgccccgttgacgcaaatgggcggtaggcgtgtacggtgggaggtctatataagcagagctcgtttagtgaaccgtc

SEQ ID NO: 18968 - DNA, 252 bp, synthetic construct
  source 1..252: mol_type = other DNA
acatctacgtattagtcatcgctattaccatggtgatgcggttttggcagtacaccaatgggcgtggatagcggtttgactcacggggatttccaagtctccaccccattgacgtcaatgggagtttgttttggcaccaaaatcaacgggactttccaaaatgtcgtaataaccccgccccgttgacgcaaatgggcggtaggcgtgtacggtgggaggtctatataagcagagctcgtttagtgaaccgtc

SEQ ID NO: 18969 - DNA, 251 bp, synthetic construct
  source 1..251: mol_type = other DNA
catctacgtattagtcatcgctattaccatggtgatgcggttttggcagtacaccaatgggcgtggatagcggtttgactcacggggatttccaagtctccaccccattgacgtcaatgggagtttgttttggcaccaaaatcaacgggactttccaaaatgtcgtaataaccccgccccgttgacgcaaatgggcggtaggcgtgtacggtgggaggtctatataagcagagctcgtttagtgaaccgtc

SEQ ID NO: 18970 - DNA, 250 bp, synthetic construct
  source 1..250: mol_type = other DNA
atctacgtattagtcatcgctattaccatggtgatgcggttttggcagtacaccaatgggcgtggatagcggtttgactcacggggatttccaagtctccaccccattgacgtcaatgggagtttgttttggcaccaaaatcaacgggactttccaaaatgtcgtaataaccccgccccgttgacgcaaatgggcggtaggcgtgtacggtgggaggtctatataagcagagctcgtttagtgaaccgtc

SEQ ID NO: 18971 - DNA, 249 bp, synthetic construct
  source 1..249: mol_type = other DNA
tctacgtattagtcatcgctattaccatggtgatgcggttttggcagtacaccaatgggcgtggatagcggtttgactcacggggatttccaagtctccaccccattgacgtcaatgggagtttgttttggcaccaaaatcaacgggactttccaaaatgtcgtaataaccccgccccgttgacgcaaatgggcggtaggcgtgtacggtgggaggtctatataagcagagctcgtttagtgaaccgtc

SEQ ID NO: 18972 - DNA, 248 bp, synthetic construct
  source 1..248: mol_type = other DNA
ctacgtattagtcatcgctattaccatggtgatgcggttttggcagtacaccaatgggcgtggatagcggtttgactcacggggatttccaagtctccaccccattgacgtcaatgggagtttgttttggcaccaaaatcaacgggactttccaaaatgtcgtaataaccccgccccgttgacgcaaatgggcggtaggcgtgtacggtgggaggtctatataagcagagctcgtttagtgaaccgtc

SEQ ID NO: 18973 - DNA, 247 bp, synthetic construct
  source 1..247: mol_type = other DNA
tacgtattagtcatcgctattaccatggtgatgcggttttggcagtacaccaatgggcgtggatagcggtttgactcacggggatttccaagtctccaccccattgacgtcaatgggagtttgttttggcaccaaaatcaacgggactttccaaaatgtcgtaataaccccgccccgttgacgcaaatgggcggtaggcgtgtacggtgggaggtctatataagcagagctcgtttagtgaaccgtc

SEQ ID NO: 18974 - DNA, 246 bp, synthetic construct
  source 1..246: mol_type = other DNA
acgtattagtcatcgctattaccatggtgatgcggttttggcagtacaccaatgggcgtggatagcggtttgactcacggggatttccaagtctccaccccattgacgtcaatgggagtttgttttggcaccaaaatcaacgggactttccaaaatgtcgtaataaccccgccccgttgacgcaaatgggcggtaggcgtgtacggtgggaggtctatataagcagagctcgtttagtgaaccgtc

SEQ ID NO: 18975 - DNA, 245 bp, synthetic construct
  source 1..245: mol_type = other DNA
cgtattagtcatcgctattaccatggtgatgcggttttggcagtacaccaatgggcgtggatagcggtttgactcacggggatttccaagtctccaccccattgacgtcaatgggagtttgttttggcaccaaaatcaacgggactttccaaaatgtcgtaataaccccgccccgttgacgcaaatgggcggtaggcgtgtacggtgggaggtctatataagcagagctcgtttagtgaaccgtc

SEQ ID NO: 18976 - DNA, 244 bp, synthetic construct
  source 1..244: mol_type = other DNA
gtattagtcatcgctattaccatggtgatgcggttttggcagtacaccaatgggcgtggatagcggtttgactcacggggatttccaagtctccaccccattgacgtcaatgggagtttgttttggcaccaaaatcaacgggactttccaaaatgtcgtaataaccccgccccgttgacgcaaatgggcggtaggcgtgtacggtgggaggtctatataagcagagctcgtttagtgaaccgtc

SEQ ID NO: 18977 - DNA, 243 bp, synthetic construct
  source 1..243: mol_type = other DNA
tattagtcatcgctattaccatggtgatgcggttttggcagtacaccaatgggcgtggatagcggtttgactcacggggatttccaagtctccaccccattgacgtcaatgggagtttgttttggcaccaaaatcaacgggactttccaaaatgtcgtaataaccccgccccgttgacgcaaatgggcggtaggcgtgtacggtgggaggtctatataagcagagctcgtttagtgaaccgtc

SEQ ID NO: 18978 - DNA, 242 bp, synthetic construct
  source 1..242: mol_type = other DNA
attagtcatcgctattaccatggtgatgcggttttggcagtacaccaatgggcgtggatagcggtttgactcacggggatttccaagtctccaccccattgacgtcaatgggagtttgttttggcaccaaaatcaacgggactttccaaaatgtcgtaataaccccgccccgttgacgcaaatgggcggtaggcgtgtacggtgggaggtctatataagcagagctcgtttagtgaaccgtc

SEQ ID NO: 18979 - DNA, 241 bp, synthetic construct
  source 1..241: mol_type = other DNA
ttagtcatcgctattaccatggtgatgcggttttggcagtacaccaatgggcgtggatagcggtttgactcacggggatttccaagtctccaccccattgacgtcaatgggagtttgttttggcaccaaaatcaacgggactttccaaaatgtcgtaataaccccgccccgttgacgcaaatgggcggtaggcgtgtacggtgggaggtctatataagcagagctcgtttagtgaaccgtc

SEQ ID NO: 18980 - DNA, 240 bp, synthetic construct
  source 1..240: mol_type = other DNA
tagtcatcgctattaccatggtgatgcggttttggcagtacaccaatgggcgtggatagcggtttgactcacggggatttccaagtctccaccccattgacgtcaatgggagtttgttttggcaccaaaatcaacgggactttccaaaatgtcgtaataaccccgccccgttgacgcaaatgggcggtaggcgtgtacggtgggaggtctatataagcagagctcgtttagtgaaccgtc

SEQ ID NO: 18981 - DNA, 239 bp, synthetic construct
  source 1..239: mol_type = other DNA
agtcatcgctattaccatggtgatgcggttttggcagtacaccaatgggcgtggatagcggtttgactcacggggatttccaagtctccaccccattgacgtcaatgggagtttgttttggcaccaaaatcaacgggactttccaaaatgtcgtaataaccccgccccgttgacgcaaatgggcggtaggcgtgtacggtgggaggtctatataagcagagctcgtttagtgaaccgtc

SEQ ID NO: 18982 - DNA, 238 bp, synthetic construct
  source 1..238: mol_type = other DNA
gtcatcgctattaccatggtgatgcggttttggcagtacaccaatgggcgtggatagcggtttgactcacggggatttccaagtctccaccccattgacgtcaatgggagtttgttttggcaccaaaatcaacgggactttccaaaatgtcgtaataaccccgccccgttgacgcaaatgggcggtaggcgtgtacggtgggaggtctatataagcagagctcgtttagtgaaccgtc

SEQ ID NO: 18983 - DNA, 237 bp, synthetic construct
  source 1..237: mol_type = other DNA
tcatcgctattaccatggtgatgcggttttggcagtacaccaatgggcgtggatagcggtttgactcacggggatttccaagtctccaccccattgacgtcaatgggagtttgttttggcaccaaaatcaacgggactttccaaaatgtcgtaataaccccgccccgttgacgcaaatgggcggtaggcgtgtacggtgggaggtctatataagcagagctcgtttagtgaaccgtc

SEQ ID NO: 18984 - DNA, 236 bp, synthetic construct
  source 1..236: mol_type = other DNA
catcgctattaccatggtgatgcggttttggcagtacaccaatgggcgtggatagcggtttgactcacggggatttccaagtctccaccccattgacgtcaatgggagtttgttttggcaccaaaatcaacgggactttccaaaatgtcgtaataaccccgccccgttgacgcaaatgggcggtaggcgtgtacggtgggaggtctatataagcagagctcgtttagtgaaccgtc

SEQ ID NO: 18985 - DNA, 235 bp, synthetic construct
  source 1..235: mol_type = other DNA
atcgctattaccatggtgatgcggttttggcagtacaccaatgggcgtggatagcggtttgactcacggggatttccaagtctccaccccattgacgtcaatgggagtttgttttggcaccaaaatcaacgggactttccaaaatgtcgtaataaccccgccccgttgacgcaaatgggcggtaggcgtgtacggtgggaggtctatataagcagagctcgtttagtgaaccgtc

SEQ ID NO: 18986 - DNA, 234 bp, synthetic construct
  source 1..234: mol_type = other DNA
tcgctattaccatggtgatgcggttttggcagtacaccaatgggcgtggatagcggtttgactcacggggatttccaagtctccaccccattgacgtcaatgggagtttgttttggcaccaaaatcaacgggactttccaaaatgtcgtaataaccccgccccgttgacgcaaatgggcggtaggcgtgtacggtgggaggtctatataagcagagctcgtttagtgaaccgtc

SEQ ID NO: 18987 - DNA, 233 bp, synthetic construct
  source 1..233: mol_type = other DNA
cgctattaccatggtgatgcggttttggcagtacaccaatgggcgtggatagcggtttgactcacggggatttccaagtctccaccccattgacgtcaatgggagtttgttttggcaccaaaatcaacgggactttccaaaatgtcgtaataaccccgccccgttgacgcaaatgggcggtaggcgtgtacggtgggaggtctatataagcagagctcgtttagtgaaccgtc

SEQ ID NO: 18988 - DNA, 232 bp, synthetic construct
  source 1..232: mol_type = other DNA
gctattaccatggtgatgcggttttggcagtacaccaatgggcgtggatagcggtttgactcacggggatttccaagtctccaccccattgacgtcaatgggagtttgttttggcaccaaaatcaacgggactttccaaaatgtcgtaataaccccgccccgttgacgcaaatgggcggtaggcgtgtacggtgggaggtctatataagcagagctcgtttagtgaaccgtc

SEQ ID NO: 18989 - DNA, 231 bp, synthetic construct
  source 1..231: mol_type = other DNA
ctattaccatggtgatgcggttttggcagtacaccaatgggcgtggatagcggtttgactcacggggatttccaagtctccaccccattgacgtcaatgggagtttgttttggcaccaaaatcaacgggactttccaaaatgtcgtaataaccccgccccgttgacgcaaatgggcggtaggcgtgtacggtgggaggtctatataagcagagctcgtttagtgaaccgtc

SEQ ID NO: 18990 - DNA, 230 bp, synthetic construct
  source 1..230: mol_type = other DNA
tattaccatggtgatgcggttttggcagtacaccaatgggcgtggatagcggtttgactcacggggatttccaagtctccaccccattgacgtcaatgggagtttgttttggcaccaaaatcaacgggactttccaaaatgtcgtaataaccccgccccgttgacgcaaatgggcggtaggcgtgtacggtgggaggtctatataagcagagctcgtttagtgaaccgtc

SEQ ID NO: 18991 - DNA, 229 bp, synthetic construct
  source 1..229: mol_type = other DNA
attaccatggtgatgcggttttggcagtacaccaatgggcgtggatagcggtttgactcacggggatttccaagtctccaccccattgacgtcaatgggagtttgttttggcaccaaaatcaacgggactttccaaaatgtcgtaataaccccgccccgttgacgcaaatgggcggtaggcgtgtacggtgggaggtctatataagcagagctcgtttagtgaaccgtc

SEQ ID NO: 18992 - DNA, 228 bp, synthetic construct
  source 1..228: mol_type = other DNA
ttaccatggtgatgcggttttggcagtacaccaatgggcgtggatagcggtttgactcacggggatttccaagtctccaccccattgacgtcaatgggagtttgttttggcaccaaaatcaacgggactttccaaaatgtcgtaataaccccgccccgttgacgcaaatgggcggtaggcgtgtacggtgggaggtctatataagcagagctcgtttagtgaaccgtc

SEQ ID NO: 18993 - DNA, 227 bp, synthetic construct
  source 1..227: mol_type = other DNA
taccatggtgatgcggttttggcagtacaccaatgggcgtggatagcggtttgactcacggggatttccaagtctccaccccattgacgtcaatgggagtttgttttggcaccaaaatcaacgggactttccaaaatgtcgtaataaccccgccccgttgacgcaaatgggcggtaggcgtgtacggtgggaggtctatataagcagagctcgtttagtgaaccgtc

SEQ ID NO: 18994 - DNA, 226 bp, synthetic construct
  source 1..226: mol_type = other DNA
accatggtgatgcggttttggcagtacaccaatgggcgtggatagcggtttgactcacggggatttccaagtctccaccccattgacgtcaatgggagtttgttttggcaccaaaatcaacgggactttccaaaatgtcgtaataaccccgccccgttgacgcaaatgggcggtaggcgtgtacggtgggaggtctatataagcagagctcgtttagtgaaccgtc

SEQ ID NO: 18995 - DNA, 225 bp, synthetic construct
  source 1..225: mol_type = other DNA
ccatggtgatgcggttttggcagtacaccaatgggcgtggatagcggtttgactcacggggatttccaagtctccaccccattgacgtcaatgggagtttgttttggcaccaaaatcaacgggactttccaaaatgtcgtaataaccccgccccgttgacgcaaatgggcggtaggcgtgtacggtgggaggtctatataagcagagctcgtttagtgaaccgtc

SEQ ID NO: 18996 - DNA, 224 bp, synthetic construct
  source 1..224: mol_type = other DNA
catggtgatgcggttttggcagtacaccaatgggcgtggatagcggtttgactcacggggatttccaagtctccaccccattgacgtcaatgggagtttgttttggcaccaaaatcaacgggactttccaaaatgtcgtaataaccccgccccgttgacgcaaatgggcggtaggcgtgtacggtgggaggtctatataagcagagctcgtttagtgaaccgtc

SEQ ID NO: 18997 - DNA, 223 bp, synthetic construct
  source 1..223: mol_type = other DNA
atggtgatgcggttttggcagtacaccaatgggcgtggatagcggtttgactcacggggatttccaagtctccaccccattgacgtcaatgggagtttgttttggcaccaaaatcaacgggactttccaaaatgtcgtaataaccccgccccgttgacgcaaatgggcggtaggcgtgtacggtgggaggtctatataagcagagctcgtttagtgaaccgtc

SEQ ID NO: 18998 - DNA, 222 bp, synthetic construct
  source 1..222: mol_type = other DNA
tggtgatgcggttttggcagtacaccaatgggcgtggatagcggtttgactcacggggatttccaagtctccaccccattgacgtcaatgggagtttgttttggcaccaaaatcaacgggactttccaaaatgtcgtaataaccccgccccgttgacgcaaatgggcggtaggcgtgtacggtgggaggtctatataagcagagctcgtttagtgaaccgtc

SEQ ID NO: 18999 - DNA, 221 bp, synthetic construct
  source 1..221: mol_type = other DNA
ggtgatgcggttttggcagtacaccaatgggcgtggatagcggtttgactcacggggatttccaagtctccaccccattgacgtcaatgggagtttgttttggcaccaaaatcaacgggactttccaaaatgtcgtaataaccccgccccgttgacgcaaatgggcggtaggcgtgtacggtgggaggtctatataagcagagctcgtttagtgaaccgtc

SEQ ID NO: 19000 - DNA, 220 bp, synthetic construct
  source 1..220: mol_type = other DNA
gtgatgcggttttggcagtacaccaatgggcgtggatagcggtttgactcacggggatttccaagtctccaccccattgacgtcaatgggagtttgttttggcaccaaaatcaacgggactttccaaaatgtcgtaataaccccgccccgttgacgcaaatgggcggtaggcgtgtacggtgggaggtctatataagcagagctcgtttagtgaaccgtc

SEQ ID NO: 19001 - DNA, 219 bp, synthetic construct
  source 1..219: mol_type = other DNA
tgatgcggttttggcagtacaccaatgggcgtggatagcggtttgactcacggggatttccaagtctccaccccattgacgtcaatgggagtttgttttggcaccaaaatcaacgggactttccaaaatgtcgtaataaccccgccccgttgacgcaaatgggcggtaggcgtgtacggtgggaggtctatataagcagagctcgtttagtgaaccgtc

SEQ ID NO: 19002 - DNA, 218 bp, synthetic construct
  source 1..218: mol_type = other DNA
gatgcggttttggcagtacaccaatgggcgtggatagcggtttgactcacggggatttccaagtctccaccccattgacgtcaatgggagtttgttttggcaccaaaatcaacgggactttccaaaatgtcgtaataaccccgccccgttgacgcaaatgggcggtaggcgtgtacggtgggaggtctatataagcagagctcgtttagtgaaccgtc

SEQ ID NO: 19003 - DNA, 217 bp, synthetic construct
  source 1..217: mol_type = other DNA
atgcggttttggcagtacaccaatgggcgtggatagcggtttgactcacggggatttccaagtctccaccccattgacgtcaatgggagtttgttttggcaccaaaatcaacgggactttccaaaatgtcgtaataaccccgccccgttgacgcaaatgggcggtaggcgtgtacggtgggaggtctatataagcagagctcgtttagtgaaccgtc

SEQ ID NO: 19004 - DNA, 216 bp, synthetic construct
  source 1..216: mol_type = other DNA
tgcggttttggcagtacaccaatgggcgtggatagcggtttgactcacggggatttccaagtctccaccccattgacgtcaatgggagtttgttttggcaccaaaatcaacgggactttccaaaatgtcgtaataaccccgccccgttgacgcaaatgggcggtaggcgtgtacggtgggaggtctatataagcagagctcgtttagtgaaccgtc

SEQ ID NO: 19005 - DNA, 215 bp, synthetic construct
  source 1..215: mol_type = other DNA
gcggttttggcagtacaccaatgggcgtggatagcggtttgactcacggggatttccaagtctccaccccattgacgtcaatgggagtttgttttggcaccaaaatcaacgggactttccaaaatgtcgtaataaccccgccccgttgacgcaaatgggcggtaggcgtgtacggtgggaggtctatataagcagagctcgtttagtgaaccgtc

SEQ ID NO: 19006 - DNA, 214 bp, synthetic construct
  source 1..214: mol_type = other DNA
cggttttggcagtacaccaatgggcgtggatagcggtttgactcacggggatttccaagtctccaccccattgacgtcaatgggagtttgttttggcaccaaaatcaacgggactttccaaaatgtcgtaataaccccgccccgttgacgcaaatgggcggtaggcgtgtacggtgggaggtctatataagcagagctcgtttagtgaaccgtc

SEQ ID NO: 19007 - DNA, 213 bp, synthetic construct
  source 1..213: mol_type = other DNA
ggttttggcagtacaccaatgggcgtggatagcggtttgactcacggggatttccaagtctccaccccattgacgtcaatgggagtttgttttggcaccaaaatcaacgggactttccaaaatgtcgtaataaccccgccccgttgacgcaaatgggcggtaggcgtgtacggtgggaggtctatataagcagagctcgtttagtgaaccgtc

SEQ ID NO: 19008 - DNA, 212 bp, synthetic construct
  source 1..212: mol_type = other DNA
gttttggcagtacaccaatgggcgtggatagcggtttgactcacggggatttccaagtctccaccccattgacgtcaatgggagtttgttttggcaccaaaatcaacgggactttccaaaatgtcgtaataaccccgccccgttgacgcaaatgggcggtaggcgtgtacggtgggaggtctatataagcagagctcgtttagtgaaccgtc

SEQ ID NO: 19009 - DNA, 211 bp, synthetic construct
  source 1..211: mol_type = other DNA
ttttggcagtacaccaatgggcgtggatagcggtttgactcacggggatttccaagtctccaccccattgacgtcaatgggagtttgttttggcaccaaaatcaacgggactttccaaaatgtcgtaataaccccgccccgttgacgcaaatgggcggtaggcgtgtacggtgggaggtctatataagcagagctcgtttagtgaaccgtc

SEQ ID NO: 19010 - DNA, 210 bp, synthetic construct
  source 1..210: mol_type = other DNA
tttggcagtacaccaatgggcgtggatagcggtttgactcacggggatttccaagtctccaccccattgacgtcaatgggagtttgttttggcaccaaaatcaacgggactttccaaaatgtcgtaataaccccgccccgttgacgcaaatgggcggtaggcgtgtacggtgggaggtctatataagcagagctcgtttagtgaaccgtc

SEQ ID NO: 19011 - DNA, 209 bp, synthetic construct
  source 1..209: mol_type = other DNA
ttggcagtacaccaatgggcgtggatagcggtttgactcacggggatttccaagtctccaccccattgacgtcaatgggagtttgttttggcaccaaaatcaacgggactttccaaaatgtcgtaataaccccgccccgttgacgcaaatgggcggtaggcgtgtacggtgggaggtctatataagcagagctcgtttagtgaaccgtc

SEQ ID NO: 19012 - DNA, 208 bp, synthetic construct
  source 1..208: mol_type = other DNA
tggcagtacaccaatgggcgtggatagcggtttgactcacggggatttccaagtctccaccccattgacgtcaatgggagtttgttttggcaccaaaatcaacgggactttccaaaatgtcgtaataaccccgccccgttgacgcaaatgggcggtaggcgtgtacggtgggaggtctatataagcagagctcgtttagtgaaccgtc

SEQ ID NO: 19013 - DNA, 207 bp, synthetic construct
  source 1..207: mol_type = other DNA
ggcagtacaccaatgggcgtggatagcggtttgactcacggggatttccaagtctccaccccattgacgtcaatgggagtttgttttggcaccaaaatcaacgggactttccaaaatgtcgtaataaccccgccccgttgacgcaaatgggcggtaggcgtgtacggtgggaggtctatataagcagagctcgtttagtgaaccgtc

SEQ ID NO: 19014 - DNA, 206 bp, synthetic construct
  source 1..206: mol_type = other DNA
gcagtacaccaatgggcgtggatagcggtttgactcacggggatttccaagtctccaccccattgacgtcaatgggagtttgttttggcaccaaaatcaacgggactttccaaaatgtcgtaataaccccgccccgttgacgcaaatgggcggtaggcgtgtacggtgggaggtctatataagcagagctcgtttagtgaaccgtc

SEQ ID NO: 19015 - DNA, 205 bp, synthetic construct
  source 1..205: mol_type = other DNA
cagtacaccaatgggcgtggatagcggtttgactcacggggatttccaagtctccaccccattgacgtcaatgggagtttgttttggcaccaaaatcaacgggactttccaaaatgtcgtaataaccccgccccgttgacgcaaatgggcggtaggcgtgtacggtgggaggtctatataagcagagctcgtttagtgaaccgtc

SEQ ID NO: 19016 - DNA, 204 bp, synthetic construct
  source 1..204: mol_type = other DNA
agtacaccaatgggcgtggatagcggtttgactcacggggatttccaagtctccaccccattgacgtcaatgggagtttgttttggcaccaaaatcaacgggactttccaaaatgtcgtaataaccccgccccgttgacgcaaatgggcggtaggcgtgtacggtgggaggtctatataagcagagctcgtttagtgaaccgtc

SEQ ID NO: 19017 - DNA, 203 bp, synthetic construct
  source 1..203: mol_type = other DNA
gtacaccaatgggcgtggatagcggtttgactcacggggatttccaagtctccaccccattgacgtcaatgggagtttgttttggcaccaaaatcaacgggactttccaaaatgtcgtaataaccccgccccgttgacgcaaatgggcggtaggcgtgtacggtgggaggtctatataagcagagctcgtttagtgaaccgtc

SEQ ID NO: 19018 - DNA, 202 bp, synthetic construct
  source 1..202: mol_type = other DNA
tacaccaatgggcgtggatagcggtttgactcacggggatttccaagtctccaccccattgacgtcaatgggagtttgttttggcaccaaaatcaacgggactttccaaaatgtcgtaataaccccgccccgttgacgcaaatgggcggtaggcgtgtacggtgggaggtctatataagcagagctcgtttagtgaaccgtc

SEQ ID NO: 19019 - DNA, 201 bp, synthetic construct
  source 1..201: mol_type = other DNA
acaccaatgggcgtggatagcggtttgactcacggggatttccaagtctccaccccattgacgtcaatgggagtttgttttggcaccaaaatcaacgggactttccaaaatgtcgtaataaccccgccccgttgacgcaaatgggcggtaggcgtgtacggtgggaggtctatataagcagagctcgtttagtgaaccgtc

SEQ ID NO: 19020 - DNA, 200 bp, synthetic construct
  source 1..200: mol_type = other DNA
caccaatgggcgtggatagcggtttgactcacggggatttccaagtctccaccccattgacgtcaatgggagtttgttttggcaccaaaatcaacgggactttccaaaatgtcgtaataaccccgccccgttgacgcaaatgggcggtaggcgtgtacggtgggaggtctatataagcagagctcgtttagtgaaccgtc

SEQ ID NO: 19021 - DNA, 199 bp, synthetic construct
  source 1..199: mol_type = other DNA
accaatgggcgtggatagcggtttgactcacggggatttccaagtctccaccccattgacgtcaatgggagtttgttttggcaccaaaatcaacgggactttccaaaatgtcgtaataaccccgccccgttgacgcaaatgggcggtaggcgtgtacggtgggaggtctatataagcagagctcgtttagtgaaccgtc

SEQ ID NO: 19022 - DNA, 198 bp, synthetic construct
  source 1..198: mol_type = other DNA
ccaatgggcgtggatagcggtttgactcacggggatttccaagtctccaccccattgacgtcaatgggagtttgttttggcaccaaaatcaacgggactttccaaaatgtcgtaataaccccgccccgttgacgcaaatgggcggtaggcgtgtacggtgggaggtctatataagcagagctcgtttagtgaaccgtc

SEQ ID NO: 19023 - DNA, 197 bp, synthetic construct
  source 1..197: mol_type = other DNA
caatgggcgtggatagcggtttgactcacggggatttccaagtctccaccccattgacgtcaatgggagtttgttttggcaccaaaatcaacgggactttccaaaatgtcgtaataaccccgccccgttgacgcaaatgggcggtaggcgtgtacggtgggaggtctatataagcagagctcgtttagtgaaccgtc

SEQ ID NO: 19024 - DNA, 196 bp, synthetic construct
  source 1..196: mol_type = other DNA
aatgggcgtggatagcggtttgactcacggggatttccaagtctccaccccattgacgtcaatgggagtttgttttggcaccaaaatcaacgggactttccaaaatgtcgtaataaccccgccccgttgacgcaaatgggcggtaggcgtgtacggtgggaggtctatataagcagagctcgtttagtgaaccgtc

SEQ ID NO: 19025 - DNA, 195 bp, synthetic construct
  source 1..195: mol_type = other DNA
atgggcgtggatagcggtttgactcacggggatttccaagtctccaccccattgacgtcaatgggagtttgttttggcaccaaaatcaacgggactttccaaaatgtcgtaataaccccgccccgttgacgcaaatgggcggtaggcgtgtacggtgggaggtctatataagcagagctcgtttagtgaaccgtc

SEQ ID NO: 19026 - DNA, 194 bp, synthetic construct
  source 1..194: mol_type = other DNA
tgggcgtggatagcggtttgactcacggggatttccaagtctccaccccattgacgtcaatgggagtttgttttggcaccaaaatcaacgggactttccaaaatgtcgtaataaccccgccccgttgacgcaaatgggcggtaggcgtgtacggtgggaggtctatataagcagagctcgtttagtgaaccgtc

SEQ ID NO: 19027 - DNA, 193 bp, synthetic construct
  source 1..193: mol_type = other DNA
gggcgtggatagcggtttgactcacggggatttccaagtctccaccccattgacgtcaatgggagtttgttttggcaccaaaatcaacgggactttccaaaatgtcgtaataaccccgccccgttgacgcaaatgggcggtaggcgtgtacggtgggaggtctatataagcagagctcgtttagtgaaccgtc

SEQ ID NO: 19028 - DNA, 192 bp, synthetic construct
  source 1..192: mol_type = other DNA
ggcgtggatagcggtttgactcacggggatttccaagtctccaccccattgacgtcaatgggagtttgttttggcaccaaaatcaacgggactttccaaaatgtcgtaataaccccgccccgttgacgcaaatgggcggtaggcgtgtacggtgggaggtctatataagcagagctcgtttagtgaaccgtc

SEQ ID NO: 19029 - DNA, 191 bp, synthetic construct
  source 1..191: mol_type = other DNA
gcgtggatagcggtttgactcacggggatttccaagtctccaccccattgacgtcaatgggagtttgttttggcaccaaaatcaacgggactttccaaaatgtcgtaataaccccgccccgttgacgcaaatgggcggtaggcgtgtacggtgggaggtctatataagcagagctcgtttagtgaaccgtc

SEQ ID NO: 19030 - DNA, 190 bp, synthetic construct
  source 1..190: mol_type = other DNA
cgtggatagcggtttgactcacggggatttccaagtctccaccccattgacgtcaatgggagtttgttttggcaccaaaatcaacgggactttccaaaatgtcgtaataaccccgccccgttgacgcaaatgggcggtaggcgtgtacggtgggaggtctatataagcagagctcgtttagtgaaccgtc

SEQ ID NO: 19031 - DNA, 189 bp, synthetic construct
  source 1..189: mol_type = other DNA
gtggatagcggtttgactcacggggatttccaagtctccaccccattgacgtcaatgggagtttgttttggcaccaaaatcaacgggactttccaaaatgtcgtaataaccccgccccgttgacgcaaatgggcggtaggcgtgtacggtgggaggtctatataagcagagctcgtttagtgaaccgtc

SEQ ID NO: 19032 - DNA, 188 bp, synthetic construct
  source 1..188: mol_type = other DNA
tggatagcggtttgactcacggggatttccaagtctccaccccattgacgtcaatgggagtttgttttggcaccaaaatcaacgggactttccaaaatgtcgtaataaccccgccccgttgacgcaaatgggcggtaggcgtgtacggtgggaggtctatataagcagagctcgtttagtgaaccgtc

SEQ ID NO: 19033 - DNA, 187 bp, synthetic construct
  source 1..187: mol_type = other DNA
ggatagcggtttgactcacggggatttccaagtctccaccccattgacgtcaatgggagtttgttttggcaccaaaatcaacgggactttccaaaatgtcgtaataaccccgccccgttgacgcaaatgggcggtaggcgtgtacggtgggaggtctatataagcagagctcgtttagtgaaccgtc

SEQ ID NO: 19034 - DNA, 186 bp, synthetic construct
  source 1..186: mol_type = other DNA
gatagcggtttgactcacggggatttccaagtctccaccccattgacgtcaatgggagtttgttttggcaccaaaatcaacgggactttccaaaatgtcgtaataaccccgccccgttgacgcaaatgggcggtaggcgtgtacggtgggaggtctatataagcagagctcgtttagtgaaccgtc

SEQ ID NO: 19035 - DNA, 185 bp, synthetic construct
  source 1..185: mol_type = other DNA
atagcggtttgactcacggggatttccaagtctccaccccattgacgtcaatgggagtttgttttggcaccaaaatcaacgggactttccaaaatgtcgtaataaccccgccccgttgacgcaaatgggcggtaggcgtgtacggtgggaggtctatataagcagagctcgtttagtgaaccgtc

SEQ ID NO: 19036 - DNA, 184 bp, synthetic construct
  source 1..184: mol_type = other DNA
tagcggtttgactcacggggatttccaagtctccaccccattgacgtcaatgggagtttgttttggcaccaaaatcaacgggactttccaaaatgtcgtaataaccccgccccgttgacgcaaatgggcggtaggcgtgtacggtgggaggtctatataagcagagctcgtttagtgaaccgtc

SEQ ID NO: 19037 - DNA, 183 bp, synthetic construct
  source 1..183: mol_type = other DNA
agcggtttgactcacggggatttccaagtctccaccccattgacgtcaatgggagtttgttttggcaccaaaatcaacgggactttccaaaatgtcgtaataaccccgccccgttgacgcaaatgggcggtaggcgtgtacggtgggaggtctatataagcagagctcgtttagtgaaccgtc

SEQ ID NO: 19038 - DNA, 182 bp, synthetic construct
  source 1..182: mol_type = other DNA
gcggtttgactcacggggatttccaagtctccaccccattgacgtcaatgggagtttgttttggcaccaaaatcaacgggactttccaaaatgtcgtaataaccccgccccgttgacgcaaatgggcggtaggcgtgtacggtgggaggtctatataagcagagctcgtttagtgaaccgtc

SEQ ID NO: 19039 - DNA, 181 bp, synthetic construct
  source 1..181: mol_type = other DNA
cggtttgactcacggggatttccaagtctccaccccattgacgtcaatgggagtttgttttggcaccaaaatcaacgggactttccaaaatgtcgtaataaccccgccccgttgacgcaaatgggcggtaggcgtgtacggtgggaggtctatataagcagagctcgtttagtgaaccgtc

SEQ ID NO: 19040 - DNA, 180 bp, synthetic construct
  source 1..180: mol_type = other DNA
ggtttgactcacggggatttccaagtctccaccccattgacgtcaatgggagtttgttttggcaccaaaatcaacgggactttccaaaatgtcgtaataaccccgccccgttgacgcaaatgggcggtaggcgtgtacggtgggaggtctatataagcagagctcgtttagtgaaccgtc

SEQ ID NO: 19041 - DNA, 179 bp, synthetic construct
  source 1..179: mol_type = other DNA
gtttgactcacggggatttccaagtctccaccccattgacgtcaatgggagtttgttttggcaccaaaatcaacgggactttccaaaatgtcgtaataaccccgccccgttgacgcaaatgggcggtaggcgtgtacggtgggaggtctatataagcagagctcgtttagtgaaccgtc

SEQ ID NO: 19042 - DNA, 178 bp, synthetic construct
  source 1..178: mol_type = other DNA
tttgactcacggggatttccaagtctccaccccattgacgtcaatgggagtttgttttggcaccaaaatcaacgggactttccaaaatgtcgtaataaccccgccccgttgacgcaaatgggcggtaggcgtgtacggtgggaggtctatataagcagagctcgtttagtgaaccgtc

SEQ ID NO: 19043 - DNA, 177 bp, synthetic construct
  source 1..177: mol_type = other DNA
ttgactcacggggatttccaagtctccaccccattgacgtcaatgggagtttgttttggcaccaaaatcaacgggactttccaaaatgtcgtaataaccccgccccgttgacgcaaatgggcggtaggcgtgtacggtgggaggtctatataagcagagctcgtttagtgaaccgtc

SEQ ID NO: 19044 - DNA, 176 bp, synthetic construct
  source 1..176: mol_type = other DNA
tgactcacggggatttccaagtctccaccccattgacgtcaatgggagtttgttttggcaccaaaatcaacgggactttccaaaatgtcgtaataaccccgccccgttgacgcaaatgggcggtaggcgtgtacggtgggaggtctatataagcagagctcgtttagtgaaccgtc

SEQ ID NO: 19045 - DNA, 175 bp, synthetic construct
  source 1..175: mol_type = other DNA
gactcacggggatttccaagtctccaccccattgacgtcaatgggagtttgttttggcaccaaaatcaacgggactttccaaaatgtcgtaataaccccgccccgttgacgcaaatgggcggtaggcgtgtacggtgggaggtctatataagcagagctcgtttagtgaaccgtc

SEQ ID NO: 19046 - DNA, 174 bp, synthetic construct
  source 1..174: mol_type = other DNA
actcacggggatttccaagtctccaccccattgacgtcaatgggagtttgttttggcaccaaaatcaacgggactttccaaaatgtcgtaataaccccgccccgttgacgcaaatgggcggtaggcgtgtacggtgggaggtctatataagcagagctcgtttagtgaaccgtc

SEQ ID NO: 19047 - DNA, 173 bp, synthetic construct
  source 1..173: mol_type = other DNA
ctcacggggatttccaagtctccaccccattgacgtcaatgggagtttgttttggcaccaaaatcaacgggactttccaaaatgtcgtaataaccccgccccgttgacgcaaatgggcggtaggcgtgtacggtgggaggtctatataagcagagctcgtttagtgaaccgtc

SEQ ID NO: 19048 - DNA, 172 bp, synthetic construct
  source 1..172: mol_type = other DNA
tcacggggatttccaagtctccaccccattgacgtcaatgggagtttgttttggcaccaaaatcaacgggactttccaaaatgtcgtaataaccccgccccgttgacgcaaatgggcggtaggcgtgtacggtgggaggtctatataagcagagctcgtttagtgaaccgtc

SEQ ID NO: 19049 - DNA, 171 bp, synthetic construct
  source 1..171: mol_type = other DNA
cacggggatttccaagtctccaccccattgacgtcaatgggagtttgttttggcaccaaaatcaacgggactttccaaaatgtcgtaataaccccgccccgttgacgcaaatgggcggtaggcgtgtacggtgggaggtctatataagcagagctcgtttagtgaaccgtc

SEQ ID NO: 19050 - DNA, 170 bp, synthetic construct
  source 1..170: mol_type = other DNA
acggggatttccaagtctccaccccattgacgtcaatgggagtttgttttggcaccaaaatcaacgggactttccaaaatgtcgtaataaccccgccccgttgacgcaaatgggcggtaggcgtgtacggtgggaggtctatataagcagagctcgtttagtgaaccgtc

SEQ ID NO: 19051 - DNA, 169 bp, synthetic construct
  source 1..169: mol_type = other DNA
cggggatttccaagtctccaccccattgacgtcaatgggagtttgttttggcaccaaaatcaacgggactttccaaaatgtcgtaataaccccgccccgttgacgcaaatgggcggtaggcgtgtacggtgggaggtctatataagcagagctcgtttagtgaaccgtc

SEQ ID NO: 19052 - DNA, 168 bp, synthetic construct
  source 1..168: mol_type = other DNA
ggggatttccaagtctccaccccattgacgtcaatgggagtttgttttggcaccaaaatcaacgggactttccaaaatgtcgtaataaccccgccccgttgacgcaaatgggcggtaggcgtgtacggtgggaggtctatataagcagagctcgtttagtgaaccgtc

SEQ ID NO: 19053 - DNA, 167 bp, synthetic construct
  source 1..167: mol_type = other DNA
gggatttccaagtctccaccccattgacgtcaatgggagtttgttttggcaccaaaatcaacgggactttccaaaatgtcgtaataaccccgccccgttgacgcaaatgggcggtaggcgtgtacggtgggaggtctatataagcagagctcgtttagtgaaccgtc

SEQ ID NO: 19054 - DNA, 166 bp, synthetic construct
  source 1..166: mol_type = other DNA
ggatttccaagtctccaccccattgacgtcaatgggagtttgttttggcaccaaaatcaacgggactttccaaaatgtcgtaataaccccgccccgttgacgcaaatgggcggtaggcgtgtacggtgggaggtctatataagcagagctcgtttagtgaaccgtc

SEQ ID NO: 19055 - DNA, 165 bp, synthetic construct
  source 1..165: mol_type = other DNA
gatttccaagtctccaccccattgacgtcaatgggagtttgttttggcaccaaaatcaacgggactttccaaaatgtcgtaataaccccgccccgttgacgcaaatgggcggtaggcgtgtacggtgggaggtctatataagcagagctcgtttagtgaaccgtc

SEQ ID NO: 19056 - DNA, 164 bp, synthetic construct
  source 1..164: mol_type = other DNA
atttccaagtctccaccccattgacgtcaatgggagtttgttttggcaccaaaatcaacgggactttccaaaatgtcgtaataaccccgccccgttgacgcaaatgggcggtaggcgtgtacggtgggaggtctatataagcagagctcgtttagtgaaccgtc

SEQ ID NO: 19057 - DNA, 163 bp, synthetic construct
  source 1..163: mol_type = other DNA
tttccaagtctccaccccattgacgtcaatgggagtttgttttggcaccaaaatcaacgggactttccaaaatgtcgtaataaccccgccccgttgacgcaaatgggcggtaggcgtgtacggtgggaggtctatataagcagagctcgtttagtgaaccgtc

SEQ ID NO: 19058 - DNA, 162 bp, synthetic construct
  source 1..162: mol_type = other DNA
ttccaagtctccaccccattgacgtcaatgggagtttgttttggcaccaaaatcaacgggactttccaaaatgtcgtaataaccccgccccgttgacgcaaatgggcggtaggcgtgtacggtgggaggtctatataagcagagctcgtttagtgaaccgtc

SEQ ID NO: 19059 - DNA, 161 bp, synthetic construct
  source 1..161: mol_type = other DNA
tccaagtctccaccccattgacgtcaatgggagtttgttttggcaccaaaatcaacgggactttccaaaatgtcgtaataaccccgccccgttgacgcaaatgggcggtaggcgtgtacggtgggaggtctatataagcagagctcgtttagtgaaccgtc

SEQ ID NO: 19060 - DNA, 160 bp, synthetic construct
  source 1..160: mol_type = other DNA
ccaagtctccaccccattgacgtcaatgggagtttgttttggcaccaaaatcaacgggactttccaaaatgtcgtaataaccccgccccgttgacgcaaatgggcggtaggcgtgtacggtgggaggtctatataagcagagctcgtttagtgaaccgtc

SEQ ID NO: 19061 - DNA, 159 bp, synthetic construct
  source 1..159: mol_type = other DNA
caagtctccaccccattgacgtcaatgggagtttgttttggcaccaaaatcaacgggactttccaaaatgtcgtaataaccccgccccgttgacgcaaatgggcggtaggcgtgtacggtgggaggtctatataagcagagctcgtttagtgaaccgtc

SEQ ID NO: 19062 - DNA, 158 bp, synthetic construct
  source 1..158: mol_type = other DNA
aagtctccaccccattgacgtcaatgggagtttgttttggcaccaaaatcaacgggactttccaaaatgtcgtaataaccccgccccgttgacgcaaatgggcggtaggcgtgtacggtgggaggtctatataagcagagctcgtttagtgaaccgtc

SEQ ID NO: 19063 - DNA, 157 bp, synthetic construct
  source 1..157: mol_type = other DNA
agtctccaccccattgacgtcaatgggagtttgttttggcaccaaaatcaacgggactttccaaaatgtcgtaataaccccgccccgttgacgcaaatgggcggtaggcgtgtacggtgggaggtctatataagcagagctcgtttagtgaaccgtc

SEQ ID NO: 19064 - DNA, 156 bp, synthetic construct
  source 1..156: mol_type = other DNA
gtctccaccccattgacgtcaatgggagtttgttttggcaccaaaatcaacgggactttccaaaatgtcgtaataaccccgccccgttgacgcaaatgggcggtaggcgtgtacggtgggaggtctatataagcagagctcgtttagtgaaccgtc

SEQ ID NO: 19065 - DNA, 155 bp, synthetic construct
  source 1..155: mol_type = other DNA
tctccaccccattgacgtcaatgggagtttgttttggcaccaaaatcaacgggactttccaaaatgtcgtaataaccccgccccgttgacgcaaatgggcggtaggcgtgtacggtgggaggtctatataagcagagctcgtttagtgaaccgtc

SEQ ID NO: 19066 - DNA, 154 bp, synthetic construct
  source 1..154: mol_type = other DNA
ctccaccccattgacgtcaatgggagtttgttttggcaccaaaatcaacgggactttccaaaatgtcgtaataaccccgccccgttgacgcaaatgggcggtaggcgtgtacggtgggaggtctatataagcagagctcgtttagtgaaccgtc

SEQ ID NO: 19067 - DNA, 153 bp, synthetic construct
  source 1..153: mol_type = other DNA
tccaccccattgacgtcaatgggagtttgttttggcaccaaaatcaacgggactttccaaaatgtcgtaataaccccgccccgttgacgcaaatgggcggtaggcgtgtacggtgggaggtctatataagcagagctcgtttagtgaaccgtc

SEQ ID NO: 19068 - DNA, 152 bp, synthetic construct
  source 1..152: mol_type = other DNA
ccaccccattgacgtcaatgggagtttgttttggcaccaaaatcaacgggactttccaaaatgtcgtaataaccccgccccgttgacgcaaatgggcggtaggcgtgtacggtgggaggtctatataagcagagctcgtttagtgaaccgtc

SEQ ID NO: 19069 - DNA, 151 bp, synthetic construct
  source 1..151: mol_type = other DNA
caccccattgacgtcaatgggagtttgttttggcaccaaaatcaacgggactttccaaaatgtcgtaataaccccgccccgttgacgcaaatgggcggtaggcgtgtacggtgggaggtctatataagcagagctcgtttagtgaaccgtc

SEQ ID NO: 19070 - DNA, 150 bp, synthetic construct
  source 1..150: mol_type = other DNA
accccattgacgtcaatgggagtttgttttggcaccaaaatcaacgggactttccaaaatgtcgtaataaccccgccccgttgacgcaaatgggcggtaggcgtgtacggtgggaggtctatataagcagagctcgtttagtgaaccgtc

SEQ ID NO: 19071 - DNA, 149 bp, synthetic construct
  source 1..149: mol_type = other DNA
ccccattgacgtcaatgggagtttgttttggcaccaaaatcaacgggactttccaaaatgtcgtaataaccccgccccgttgacgcaaatgggcggtaggcgtgtacggtgggaggtctatataagcagagctcgtttagtgaaccgtc

SEQ ID NO: 19072 - DNA, 148 bp, synthetic construct
  source 1..148: mol_type = other DNA
cccattgacgtcaatgggagtttgttttggcaccaaaatcaacgggactttccaaaatgtcgtaataaccccgccccgttgacgcaaatgggcggtaggcgtgtacggtgggaggtctatataagcagagctcgtttagtgaaccgtc

SEQ ID NO: 19073 - DNA, 147 bp, synthetic construct
  source 1..147: mol_type = other DNA
ccattgacgtcaatgggagtttgttttggcaccaaaatcaacgggactttccaaaatgtcgtaataaccccgccccgttgacgcaaatgggcggtaggcgtgtacggtgggaggtctatataagcagagctcgtttagtgaaccgtc

SEQ ID NO: 19074 - DNA, 146 bp, synthetic construct
  source 1..146: mol_type = other DNA
cattgacgtcaatgggagtttgttttggcaccaaaatcaacgggactttccaaaatgtcgtaataaccccgccccgttgacgcaaatgggcggtaggcgtgtacggtgggaggtctatataagcagagctcgtttagtgaaccgtc

SEQ ID NO: 19075 - DNA, 145 bp, synthetic construct
  source 1..145: mol_type = other DNA
attgacgtcaatgggagtttgttttggcaccaaaatcaacgggactttccaaaatgtcgtaataaccccgccccgttgacgcaaatgggcggtaggcgtgtacggtgggaggtctatataagcagagctcgtttagtgaaccgtc

SEQ ID NO: 19076 - DNA, 144 bp, synthetic construct
  source 1..144: mol_type = other DNA
ttgacgtcaatgggagtttgttttggcaccaaaatcaacgggactttccaaaatgtcgtaataaccccgccccgttgacgcaaatgggcggtaggcgtgtacggtgggaggtctatataagcagagctcgtttagtgaaccgtc

SEQ ID NO: 19077 - DNA, 143 bp, synthetic construct
  source 1..143: mol_type = other DNA
tgacgtcaatgggagtttgttttggcaccaaaatcaacgggactttccaaaatgtcgtaataaccccgccccgttgacgcaaatgggcggtaggcgtgtacggtgggaggtctatataagcagagctcgtttagtgaaccgtc

SEQ ID NO: 19078 - DNA, 142 bp, synthetic construct
  source 1..142: mol_type = other DNA
gacgtcaatgggagtttgttttggcaccaaaatcaacgggactttccaaaatgtcgtaataaccccgccccgttgacgcaaatgggcggtaggcgtgtacggtgggaggtctatataagcagagctcgtttagtgaaccgtc

SEQ ID NO: 19079 - DNA, 141 bp, synthetic construct
  source 1..141: mol_type = other DNA
acgtcaatgggagtttgttttggcaccaaaatcaacgggactttccaaaatgtcgtaataaccccgccccgttgacgcaaatgggcggtaggcgtgtacggtgggaggtctatataagcagagctcgtttagtgaaccgtc

SEQ ID NO: 19080 - DNA, 140 bp, synthetic construct
  source 1..140: mol_type = other DNA
cgtcaatgggagtttgttttggcaccaaaatcaacgggactttccaaaatgtcgtaataaccccgccccgttgacgcaaatgggcggtaggcgtgtacggtgggaggtctatataagcagagctcgtttagtgaaccgtc

SEQ ID NO: 19081 - DNA, 139 bp, synthetic construct
  source 1..139: mol_type = other DNA
gtcaatgggagtttgttttggcaccaaaatcaacgggactttccaaaatgtcgtaataaccccgccccgttgacgcaaatgggcggtaggcgtgtacggtgggaggtctatataagcagagctcgtttagtgaaccgtc

SEQ ID NO: 19082 - DNA, 138 bp, synthetic construct
  source 1..138: mol_type = other DNA
tcaatgggagtttgttttggcaccaaaatcaacgggactttccaaaatgtcgtaataaccccgccccgttgacgcaaatgggcggtaggcgtgtacggtgggaggtctatataagcagagctcgtttagtgaaccgtc

SEQ ID NO: 19083 - DNA, 137 bp, synthetic construct
  source 1..137: mol_type = other DNA
caatgggagtttgttttggcaccaaaatcaacgggactttccaaaatgtcgtaataaccccgccccgttgacgcaaatgggcggtaggcgtgtacggtgggaggtctatataagcagagctcgtttagtgaaccgtc

SEQ ID NO: 19084 - DNA, 136 bp, synthetic construct
  source 1..136: mol_type = other DNA
aatgggagtttgttttggcaccaaaatcaacgggactttccaaaatgtcgtaataaccccgccccgttgacgcaaatgggcggtaggcgtgtacggtgggaggtctatataagcagagctcgtttagtgaaccgtc

SEQ ID NO: 19085 - DNA, 135 bp, synthetic construct
  source 1..135: mol_type = other DNA
atgggagtttgttttggcaccaaaatcaacgggactttccaaaatgtcgtaataaccccgccccgttgacgcaaatgggcggtaggcgtgtacggtgggaggtctatataagcagagctcgtttagtgaaccgtc

SEQ ID NO: 19086 - DNA, 134 bp, synthetic construct
  source 1..134: mol_type = other DNA
tgggagtttgttttggcaccaaaatcaacgggactttccaaaatgtcgtaataaccccgccccgttgacgcaaatgggcggtaggcgtgtacggtgggaggtctatataagcagagctcgtttagtgaaccgtc

SEQ ID NO: 19087 - DNA, 133 bp, synthetic construct
  source 1..133: mol_type = other DNA
gggagtttgttttggcaccaaaatcaacgggactttccaaaatgtcgtaataaccccgccccgttgacgcaaatgggcggtaggcgtgtacggtgggaggtctatataagcagagctcgtttagtgaaccgtc

SEQ ID NO: 19088 - DNA, 132 bp, synthetic construct
  source 1..132: mol_type = other DNA
ggagtttgttttggcaccaaaatcaacgggactttccaaaatgtcgtaataaccccgccccgttgacgcaaatgggcggtaggcgtgtacggtgggaggtctatataagcagagctcgtttagtgaaccgtc

SEQ ID NO: 19089 - DNA, 131 bp, synthetic construct
  source 1..131: mol_type = other DNA
gagtttgttttggcaccaaaatcaacgggactttccaaaatgtcgtaataaccccgccccgttgacgcaaatgggcggtaggcgtgtacggtgggaggtctatataagcagagctcgtttagtgaaccgtc

SEQ ID NO: 19090 - DNA, 130 bp, synthetic construct
  source 1..130: mol_type = other DNA
agtttgttttggcaccaaaatcaacgggactttccaaaatgtcgtaataaccccgccccgttgacgcaaatgggcggtaggcgtgtacggtgggaggtctatataagcagagctcgtttagtgaaccgtc

SEQ ID NO: 19091 - DNA, 129 bp, synthetic construct
  source 1..129: mol_type = other DNA
gtttgttttggcaccaaaatcaacgggactttccaaaatgtcgtaataaccccgccccgttgacgcaaatgggcggtaggcgtgtacggtgggaggtctatataagcagagctcgtttagtgaaccgtc

SEQ ID NO: 19092 - DNA, 128 bp, synthetic construct
  source 1..128: mol_type = other DNA
tttgttttggcaccaaaatcaacgggactttccaaaatgtcgtaataaccccgccccgttgacgcaaatgggcggtaggcgtgtacggtgggaggtctatataagcagagctcgtttagtgaaccgtc

SEQ ID NO: 19093 - DNA, 127 bp, synthetic construct
  source 1..127: mol_type = other DNA
ttgttttggcaccaaaatcaacgggactttccaaaatgtcgtaataaccccgccccgttgacgcaaatgggcggtaggcgtgtacggtgggaggtctatataagcagagctcgtttagtgaaccgtc

SEQ ID NO: 19094 - DNA, 126 bp, synthetic construct
  source 1..126: mol_type = other DNA
tgttttggcaccaaaatcaacgggactttccaaaatgtcgtaataaccccgccccgttgacgcaaatgggcggtaggcgtgtacggtgggaggtctatataagcagagctcgtttagtgaaccgtc

SEQ ID NO: 19095 - DNA, 125 bp, synthetic construct
  source 1..125: mol_type = other DNA
gttttggcaccaaaatcaacgggactttccaaaatgtcgtaataaccccgccccgttgacgcaaatgggcggtaggcgtgtacggtgggaggtctatataagcagagctcgtttagtgaaccgtc

SEQ ID NO: 19096 - DNA, 124 bp, synthetic construct
  source 1..124: mol_type = other DNA
ttttggcaccaaaatcaacgggactttccaaaatgtcgtaataaccccgccccgttgacgcaaatgggcggtaggcgtgtacggtgggaggtctatataagcagagctcgtttagtgaaccgtc

SEQ ID NO: 19097 - DNA, 123 bp, synthetic construct
  source 1..123: mol_type = other DNA
tttggcaccaaaatcaacgggactttccaaaatgtcgtaataaccccgccccgttgacgcaaatgggcggtaggcgtgtacggtgggaggtctatataagcagagctcgtttagtgaaccgtc

SEQ ID NO: 19098 - DNA, 122 bp, synthetic construct
  source 1..122: mol_type = other DNA
ttggcaccaaaatcaacgggactttccaaaatgtcgtaataaccccgccccgttgacgcaaatgggcggtaggcgtgtacggtgggaggtctatataagcagagctcgtttagtgaaccgtc

SEQ ID NO: 19099 - DNA, 121 bp, synthetic construct
  source 1..121: mol_type = other DNA
tggcaccaaaatcaacgggactttccaaaatgtcgtaataaccccgccccgttgacgcaaatgggcggtaggcgtgtacggtgggaggtctatataagcagagctcgtttagtgaaccgtc

SEQ ID NO: 19100 - DNA, 120 bp, synthetic construct
  source 1..120: mol_type = other DNA
ggcaccaaaatcaacgggactttccaaaatgtcgtaataaccccgccccgttgacgcaaatgggcggtaggcgtgtacggtgggaggtctatataagcagagctcgtttagtgaaccgtc

SEQ ID NO: 19101 - DNA, 119 bp, synthetic construct
  source 1..119: mol_type = other DNA
gcaccaaaatcaacgggactttccaaaatgtcgtaataaccccgccccgttgacgcaaatgggcggtaggcgtgtacggtgggaggtctatataagcagagctcgtttagtgaaccgtc

SEQ ID NO: 19102 - DNA, 118 bp, synthetic construct
  source 1..118: mol_type = other DNA
caccaaaatcaacgggactttccaaaatgtcgtaataaccccgccccgttgacgcaaatgggcggtaggcgtgtacggtgggaggtctatataagcagagctcgtttagtgaaccgtc

SEQ ID NO: 19103 - DNA, 117 bp, synthetic construct
  source 1..117: mol_type = other DNA
accaaaatcaacgggactttccaaaatgtcgtaataaccccgccccgttgacgcaaatgggcggtaggcgtgtacggtgggaggtctatataagcagagctcgtttagtgaaccgtc

SEQ ID NO: 19104 - DNA, 116 bp, synthetic construct
  source 1..116: mol_type = other DNA
ccaaaatcaacgggactttccaaaatgtcgtaataaccccgccccgttgacgcaaatgggcggtaggcgtgtacggtgggaggtctatataagcagagctcgtttagtgaaccgtc

SEQ ID NO: 19105 - DNA, 115 bp, synthetic construct
  source 1..115: mol_type = other DNA
caaaatcaacgggactttccaaaatgtcgtaataaccccgccccgttgacgcaaatgggcggtaggcgtgtacggtgggaggtctatataagcagagctcgtttagtgaaccgtc

SEQ ID NO: 19106 - DNA, 114 bp, synthetic construct
  source 1..114: mol_type = other DNA
aaaatcaacgggactttccaaaatgtcgtaataaccccgccccgttgacgcaaatgggcggtaggcgtgtacggtgggaggtctatataagcagagctcgtttagtgaaccgtc

SEQ ID NO: 19107 - DNA, 113 bp, synthetic construct
  source 1..113: mol_type = other DNA
aaatcaacgggactttccaaaatgtcgtaataaccccgccccgttgacgcaaatgggcggtaggcgtgtacggtgggaggtctatataagcagagctcgtttagtgaaccgtc

SEQ ID NO: 19108 - DNA, 112 bp, synthetic construct
  source 1..112: mol_type = other DNA
aatcaacgggactttccaaaatgtcgtaataaccccgccccgttgacgcaaatgggcggtaggcgtgtacggtgggaggtctatataagcagagctcgtttagtgaaccgtc

SEQ ID NO: 19109 - DNA, 111 bp, synthetic construct
  source 1..111: mol_type = other DNA
atcaacgggactttccaaaatgtcgtaataaccccgccccgttgacgcaaatgggcggtaggcgtgtacggtgggaggtctatataagcagagctcgtttagtgaaccgtc

SEQ ID NO: 19110 - DNA, 110 bp, synthetic construct
  source 1..110: mol_type = other DNA
tcaacgggactttccaaaatgtcgtaataaccccgccccgttgacgcaaatgggcggtaggcgtgtacggtgggaggtctatataagcagagctcgtttagtgaaccgtc

SEQ ID NO: 19111 - DNA, 109 bp, synthetic construct
  source 1..109: mol_type = other DNA
caacgggactttccaaaatgtcgtaataaccccgccccgttgacgcaaatgggcggtaggcgtgtacggtgggaggtctatataagcagagctcgtttagtgaaccgtc

SEQ ID NO: 19112 - DNA, 108 bp, synthetic construct
  source 1..108: mol_type = other DNA
aacgggactttccaaaatgtcgtaataaccccgccccgttgacgcaaatgggcggtaggcgtgtacggtgggaggtctatataagcagagctcgtttagtgaaccgtc

SEQ ID NO: 19113 - DNA, 107 bp, synthetic construct
  source 1..107: mol_type = other DNA
acgggactttccaaaatgtcgtaataaccccgccccgttgacgcaaatgggcggtaggcgtgtacggtgggaggtctatataagcagagctcgtttagtgaaccgtc

SEQ ID NO: 19114 - DNA, 106 bp, synthetic construct
  source 1..106: mol_type = other DNA
cgggactttccaaaatgtcgtaataaccccgccccgttgacgcaaatgggcggtaggcgtgtacggtgggaggtctatataagcagagctcgtttagtgaaccgtc

SEQ ID NO: 19115 - DNA, 105 bp, synthetic construct
  source 1..105: mol_type = other DNA
gggactttccaaaatgtcgtaataaccccgccccgttgacgcaaatgggcggtaggcgtgtacggtgggaggtctatataagcagagctcgtttagtgaaccgtc

SEQ ID NO: 19116 - DNA, 104 bp, synthetic construct
  source 1..104: mol_type = other DNA
ggactttccaaaatgtcgtaataaccccgccccgttgacgcaaatgggcggtaggcgtgtacggtgggaggtctatataagcagagctcgtttagtgaaccgtc

SEQ ID NO: 19117 - DNA, 103 bp, synthetic construct
  source 1..103: mol_type = other DNA
gactttccaaaatgtcgtaataaccccgccccgttgacgcaaatgggcggtaggcgtgtacggtgggaggtctatataagcagagctcgtttagtgaaccgtc

SEQ ID NO: 19118 - DNA, 102 bp, synthetic construct
  source 1..102: mol_type = other DNA
actttccaaaatgtcgtaataaccccgccccgttgacgcaaatgggcggtaggcgtgtacggtgggaggtctatataagcagagctcgtttagtgaaccgtc

SEQ ID NO: 19119 - DNA, 101 bp, synthetic construct
  source 1..101: mol_type = other DNA
ctttccaaaatgtcgtaataaccccgccccgttgacgcaaatgggcggtaggcgtgtacggtgggaggtctatataagcagagctcgtttagtgaaccgtc

SEQ ID NO: 19120 - DNA, 100 bp, synthetic construct
  source 1..100: mol_type = other DNA
tttccaaaatgtcgtaataaccccgccccgttgacgcaaatgggcggtaggcgtgtacggtgggaggtctatataagcagagctcgtttagtgaaccgtc

SEQ ID NO: 19121 - DNA, 99 bp, synthetic construct
  source 1..99: mol_type = other DNA
ttccaaaatgtcgtaataaccccgccccgttgacgcaaatgggcggtaggcgtgtacggtgggaggtctatataagcagagctcgtttagtgaaccgtc

SEQ ID NO: 19122 - DNA, 98 bp, synthetic construct
  source 1..98: mol_type = other DNA
tccaaaatgtcgtaataaccccgccccgttgacgcaaatgggcggtaggcgtgtacggtgggaggtctatataagcagagctcgtttagtgaaccgtc

SEQ ID NO: 19123 - DNA, 97 bp, synthetic construct
  source 1..97: mol_type = other DNA
ccaaaatgtcgtaataaccccgccccgttgacgcaaatgggcggtaggcgtgtacggtgggaggtctatataagcagagctcgtttagtgaaccgtc

SEQ ID NO: 19124 - DNA, 96 bp, synthetic construct
  source 1..96: mol_type = other DNA
caaaatgtcgtaataaccccgccccgttgacgcaaatgggcggtaggcgtgtacggtgggaggtctatataagcagagctcgtttagtgaaccgtc

SEQ ID NO: 19125 - DNA, 95 bp, synthetic construct
  source 1..95: mol_type = other DNA
aaaatgtcgtaataaccccgccccgttgacgcaaatgggcggtaggcgtgtacggtgggaggtctatataagcagagctcgtttagtgaaccgtc

SEQ ID NO: 19126 - DNA, 94 bp, synthetic construct
  source 1..94: mol_type = other DNA
aaatgtcgtaataaccccgccccgttgacgcaaatgggcggtaggcgtgtacggtgggaggtctatataagcagagctcgtttagtgaaccgtc

SEQ ID NO: 19127 - DNA, 93 bp, synthetic construct
  source 1..93: mol_type = other DNA
aatgtcgtaataaccccgccccgttgacgcaaatgggcggtaggcgtgtacggtgggaggtctatataagcagagctcgtttagtgaaccgtc

SEQ ID NO: 19128 - DNA, 92 bp, synthetic construct
  source 1..92: mol_type = other DNA
atgtcgtaataaccccgccccgttgacgcaaatgggcggtaggcgtgtacggtgggaggtctatataagcagagctcgtttagtgaaccgtc

SEQ ID NO: 19129 - DNA, 91 bp, synthetic construct
  source 1..91: mol_type = other DNA
tgtcgtaataaccccgccccgttgacgcaaatgggcggtaggcgtgtacggtgggaggtctatataagcagagctcgtttagtgaaccgtc

SEQ ID NO: 19130 - DNA, 90 bp, synthetic construct
  source 1..90: mol_type = other DNA
gtcgtaataaccccgccccgttgacgcaaatgggcggtaggcgtgtacggtgggaggtctatataagcagagctcgtttagtgaaccgtc

SEQ ID NO: 19131 - DNA, 89 bp, synthetic construct
  source 1..89: mol_type = other DNA
tcgtaataaccccgccccgttgacgcaaatgggcggtaggcgtgtacggtgggaggtctatataagcagagctcgtttagtgaaccgtc

SEQ ID NO: 19132 - DNA, 88 bp, synthetic construct
  source 1..88: mol_type = other DNA
cgtaataaccccgccccgttgacgcaaatgggcggtaggcgtgtacggtgggaggtctatataagcagagctcgtttagtgaaccgtc

SEQ ID NO: 19133 - DNA, 87 bp, synthetic construct
  source 1..87: mol_type = other DNA
gtaataaccccgccccgttgacgcaaatgggcggtaggcgtgtacggtgggaggtctatataagcagagctcgtttagtgaaccgtc

SEQ ID NO: 19134 - DNA, 86 bp, synthetic construct
  source 1..86: mol_type = other DNA
taataaccccgccccgttgacgcaaatgggcggtaggcgtgtacggtgggaggtctatataagcagagctcgtttagtgaaccgtc

SEQ ID NO: 19135 - DNA, 85 bp, synthetic construct
  source 1..85: mol_type = other DNA
aataaccccgccccgttgacgcaaatgggcggtaggcgtgtacggtgggaggtctatataagcagagctcgtttagtgaaccgtc

SEQ ID NO: 19136 - DNA, 84 bp, synthetic construct
  source 1..84: mol_type = other DNA
ataaccccgccccgttgacgcaaatgggcggtaggcgtgtacggtgggaggtctatataagcagagctcgtttagtgaaccgtc

SEQ ID NO: 19137 - DNA, 83 bp, synthetic construct
  source 1..83: mol_type = other DNA
taaccccgccccgttgacgcaaatgggcggtaggcgtgtacggtgggaggtctatataagcagagctcgtttagtgaaccgtc

SEQ ID NO: 19138 - DNA, 82 bp, synthetic construct
  source 1..82: mol_type = other DNA
aaccccgccccgttgacgcaaatgggcggtaggcgtgtacggtgggaggtctatataagcagagctcgtttagtgaaccgtc

SEQ ID NO: 19139 - DNA, 81 bp, synthetic construct
  source 1..81: mol_type = other DNA
accccgccccgttgacgcaaatgggcggtaggcgtgtacggtgggaggtctatataagcagagctcgtttagtgaaccgtc

SEQ ID NO: 19140 - DNA, 80 bp, synthetic construct
  source 1..80: mol_type = other DNA
ccccgccccgttgacgcaaatgggcggtaggcgtgtacggtgggaggtctatataagcagagctcgtttagtgaaccgtc

SEQ ID NO: 19141 - DNA, 79 bp, synthetic construct
  source 1..79: mol_type = other DNA
cccgccccgttgacgcaaatgggcggtaggcgtgtacggtgggaggtctatataagcagagctcgtttagtgaaccgtc

SEQ ID NO: 19142 - DNA, 78 bp, synthetic construct
  source 1..78: mol_type = other DNA
ccgccccgttgacgcaaatgggcggtaggcgtgtacggtgggaggtctatataagcagagctcgtttagtgaaccgtc

SEQ ID NO: 19143 - DNA, 77 bp, synthetic construct
  source 1..77: mol_type = other DNA
cgccccgttgacgcaaatgggcggtaggcgtgtacggtgggaggtctatataagcagagctcgtttagtgaaccgtc

SEQ ID NO: 19144 - DNA, 76 bp, synthetic construct
  source 1..76: mol_type = other DNA
gccccgttgacgcaaatgggcggtaggcgtgtacggtgggaggtctatataagcagagctcgtttagtgaaccgtc

SEQ ID NO: 19145 - DNA, 75 bp, synthetic construct
  source 1..75: mol_type = other DNA
ccccgttgacgcaaatgggcggtaggcgtgtacggtgggaggtctatataagcagagctcgtttagtgaaccgtc

SEQ ID NO: 19146 - DNA, 74 bp, synthetic construct
  source 1..74: mol_type = other DNA
cccgttgacgcaaatgggcggtaggcgtgtacggtgggaggtctatataagcagagctcgtttagtgaaccgtc

SEQ ID NO: 19147 - DNA, 73 bp, synthetic construct
  source 1..73: mol_type = other DNA
ccgttgacgcaaatgggcggtaggcgtgtacggtgggaggtctatataagcagagctcgtttagtgaaccgtc

SEQ ID NO: 19148 - DNA, 72 bp, synthetic construct
  source 1..72: mol_type = other DNA
cgttgacgcaaatgggcggtaggcgtgtacggtgggaggtctatataagcagagctcgtttagtgaaccgtc

SEQ ID NO: 19149 - DNA, 71 bp, synthetic construct
  source 1..71: mol_type = other DNA
gttgacgcaaatgggcggtaggcgtgtacggtgggaggtctatataagcagagctcgtttagtgaaccgtc

SEQ ID NO: 19150 - DNA, 70 bp, synthetic construct
  source 1..70: mol_type = other DNA
ttgacgcaaatgggcggtaggcgtgtacggtgggaggtctatataagcagagctcgtttagtgaaccgtc

SEQ ID NO: 19151 - DNA, 69 bp, synthetic construct
  source 1..69: mol_type = other DNA
tgacgcaaatgggcggtaggcgtgtacggtgggaggtctatataagcagagctcgtttagtgaaccgtc

SEQ ID NO: 19152 - DNA, 68 bp, synthetic construct
  source 1..68: mol_type = other DNA
gacgcaaatgggcggtaggcgtgtacggtgggaggtctatataagcagagctcgtttagtgaaccgtc

SEQ ID NO: 19153 - DNA, 67 bp, synthetic construct
  source 1..67: mol_type = other DNA
acgcaaatgggcggtaggcgtgtacggtgggaggtctatataagcagagctcgtttagtgaaccgtc

SEQ ID NO: 19154 - DNA, 66 bp, synthetic construct
  source 1..66: mol_type = other DNA
cgcaaatgggcggtaggcgtgtacggtgggaggtctatataagcagagctcgtttagtgaaccgtc

SEQ ID NO: 19155 - DNA, 65 bp, synthetic construct
  source 1..65: mol_type = other DNA
gcaaatgggcggtaggcgtgtacggtgggaggtctatataagcagagctcgtttagtgaaccgtc

SEQ ID NO: 19156 - DNA, 64 bp, synthetic construct
  source 1..64: mol_type = other DNA
caaatgggcggtaggcgtgtacggtgggaggtctatataagcagagctcgtttagtgaaccgtc

SEQ ID NO: 19157 - DNA, 63 bp, synthetic construct
  source 1..63: mol_type = other DNA
aaatgggcggtaggcgtgtacggtgggaggtctatataagcagagctcgtttagtgaaccgtc

SEQ ID NO: 19158 - DNA, 62 bp, synthetic construct
  source 1..62: mol_type = other DNA
aatgggcggtaggcgtgtacggtgggaggtctatataagcagagctcgtttagtgaaccgtc

SEQ ID NO: 19159 - DNA, 61 bp, synthetic construct
  source 1..61: mol_type = other DNA
atgggcggtaggcgtgtacggtgggaggtctatataagcagagctcgtttagtgaaccgtc

SEQ ID NO: 19160 - DNA, 60 bp, synthetic construct
  source 1..60: mol_type = other DNA
tgggcggtaggcgtgtacggtgggaggtctatataagcagagctcgtttagtgaaccgtc

SEQ ID NO: 19161 - DNA, 59 bp, synthetic construct
  source 1..59: mol_type = other DNA
gggcggtaggcgtgtacggtgggaggtctatataagcagagctcgtttagtgaaccgtc

SEQ ID NO: 19162 - DNA, 58 bp, synthetic construct
  source 1..58: mol_type = other DNA
ggcggtaggcgtgtacggtgggaggtctatataagcagagctcgtttagtgaaccgtc

SEQ ID NO: 19163 - DNA, 57 bp, synthetic construct
  source 1..57: mol_type = other DNA
gcggtaggcgtgtacggtgggaggtctatataagcagagctcgtttagtgaaccgtc

SEQ ID NO: 19164 - DNA, 56 bp, synthetic construct
  source 1..56: mol_type = other DNA
cggtaggcgtgtacggtgggaggtctatataagcagagctcgtttagtgaaccgtc

SEQ ID NO: 19165 - DNA, 55 bp, synthetic construct
  source 1..55: mol_type = other DNA
ggtaggcgtgtacggtgggaggtctatataagcagagctcgtttagtgaaccgtc

SEQ ID NO: 19166 - DNA, 54 bp, synthetic construct
  source 1..54: mol_type = other DNA
gtaggcgtgtacggtgggaggtctatataagcagagctcgtttagtgaaccgtc

SEQ ID NO: 19167 - DNA, 53 bp, synthetic construct
  source 1..53: mol_type = other DNA
taggcgtgtacggtgggaggtctatataagcagagctcgtttagtgaaccgtc

SEQ ID NO: 19168 - DNA, 52 bp, synthetic construct
  source 1..52: mol_type = other DNA
aggcgtgtacggtgggaggtctatataagcagagctcgtttagtgaaccgtc

SEQ ID NO: 19169 - DNA, 51 bp, synthetic construct
  source 1..51: mol_type = other DNA
ggcgtgtacggtgggaggtctatataagcagagctcgtttagtgaaccgtc

SEQ ID NO: 19170 - DNA, 50 bp, synthetic construct
  source 1..50: mol_type = other DNA
gcgtgtacggtgggaggtctatataagcagagctcgtttagtgaaccgtc

SEQ ID NO: 19171 - DNA, 49 bp, synthetic construct
  source 1..49: mol_type = other DNA
cgtgtacggtgggaggtctatataagcagagctcgtttagtgaaccgtc

SEQ ID NO: 19172 - DNA, 48 bp, synthetic construct
  source 1..48: mol_type = other DNA
gtgtacggtgggaggtctatataagcagagctcgtttagtgaaccgtc

SEQ ID NO: 19173 - DNA, 47 bp, synthetic construct
  source 1..47: mol_type = other DNA
tgtacggtgggaggtctatataagcagagctcgtttagtgaaccgtc

SEQ ID NO: 19174 - DNA, 46 bp, synthetic construct
  source 1..46: mol_type = other DNA
gtacggtgggaggtctatataagcagagctcgtttagtgaaccgtc

SEQ ID NO: 19175 - DNA, 45 bp, synthetic construct
  source 1..45: mol_type = other DNA
tacggtgggaggtctatataagcagagctcgtttagtgaaccgtc

SEQ ID NO: 19176 - DNA, 44 bp, synthetic construct
  source 1..44: mol_type = other DNA
acggtgggaggtctatataagcagagctcgtttagtgaaccgtc

SEQ ID NO: 19177 - DNA, 43 bp, synthetic construct
  source 1..43: mol_type = other DNA
cggtgggaggtctatataagcagagctcgtttagtgaaccgtc

SEQ ID NO: 19178 - DNA, 42 bp, synthetic construct
  source 1..42: mol_type = other DNA
ggtgggaggtctatataagcagagctcgtttagtgaaccgtc

SEQ ID NO: 19179 - DNA, 41 bp, synthetic construct
  source 1..41: mol_type = other DNA
gtgggaggtctatataagcagagctcgtttagtgaaccgtc

SEQ ID NO: 19180 - DNA, 40 bp, synthetic construct
  source 1..40: mol_type = other DNA
tgggaggtctatataagcagagctcgtttagtgaaccgtc

SEQ ID NO: 19181 - DNA, 39 bp, synthetic construct
  source 1..39: mol_type = other DNA
gggaggtctatataagcagagctcgtttagtgaaccgtc

SEQ ID NO: 19182 - DNA, 38 bp, synthetic construct
  source 1..38: mol_type = other DNA
ggaggtctatataagcagagctcgtttagtgaaccgtc

SEQ ID NO: 19183 - DNA, 37 bp, synthetic construct
  source 1..37: mol_type = other DNA
gaggtctatataagcagagctcgtttagtgaaccgtc

SEQ ID NO: 19184 - DNA, 36 bp, synthetic construct
  source 1..36: mol_type = other DNA
aggtctatataagcagagctcgtttagtgaaccgtc

SEQ ID NO: 19185 - DNA, 35 bp, synthetic construct
  source 1..35: mol_type = other DNA
ggtctatataagcagagctcgtttagtgaaccgtc

SEQ ID NO: 19186 - DNA, 34 bp, synthetic construct
  source 1..34: mol_type = other DNA
gtctatataagcagagctcgtttagtgaaccgtc

SEQ ID NO: 19187 - DNA, 33 bp, synthetic construct
  source 1..33: mol_type = other DNA
tctatataagcagagctcgtttagtgaaccgtc

SEQ ID NO: 19188 - DNA, 32 bp, synthetic construct
  source 1..32: mol_type = other DNA
ctatataagcagagctcgtttagtgaaccgtc

SEQ ID NO: 19189 - DNA, 31 bp, synthetic construct
  source 1..31: mol_type = other DNA
tatataagcagagctcgtttagtgaaccgtc

SEQ ID NO: 19190 - DNA, 30 bp, synthetic construct
  source 1..30: mol_type = other DNA
atataagcagagctcgtttagtgaaccgtc

SEQ ID NO: 19191 - DNA, 29 bp, synthetic construct
  source 1..29: mol_type = other DNA
tataagcagagctcgtttagtgaaccgtc

SEQ ID NO: 19192 - DNA, 28 bp, synthetic construct
  source 1..28: mol_type = other DNA
ataagcagagctcgtttagtgaaccgtc

SEQ ID NO: 19193 - DNA, 27 bp, synthetic construct
  source 1..27: mol_type = other DNA
taagcagagctcgtttagtgaaccgtc

SEQ ID NO: 19194 - DNA, 26 bp, synthetic construct
  source 1..26: mol_type = other DNA
aagcagagctcgtttagtgaaccgtc

SEQ ID NO: 19195 - DNA, 25 bp, synthetic construct
  source 1..25: mol_type = other DNA
agcagagctcgtttagtgaaccgtc

SEQ ID NO: 19196 - DNA, 24 bp, synthetic construct
  source 1..24: mol_type = other DNA
gcagagctcgtttagtgaaccgtc

SEQ ID NO: 19197 - DNA, 23 bp, synthetic construct
  source 1..23: mol_type = other DNA
cagagctcgtttagtgaaccgtc

SEQ ID NO: 19198 - DNA, 22 bp, synthetic construct
  source 1..22: mol_type = other DNA
agagctcgtttagtgaaccgtc

SEQ ID NO: 19199 - DNA, 21 bp, synthetic construct
  source 1..21: mol_type = other DNA
gagctcgtttagtgaaccgtc

SEQ ID NO: 19200 - DNA, 20 bp, synthetic construct
  source 1..20: mol_type = other DNA
agctcgtttagtgaaccgtc

SEQ ID NO: 19201 - DNA, 19 bp, synthetic construct
  source 1..19: mol_type = other DNA
gctcgtttagtgaaccgtc

SEQ ID NO: 19202 - DNA, 18 bp, synthetic construct
  source 1..18: mol_type = other DNA
ctcgtttagtgaaccgtc

SEQ ID NO: 19203 - DNA, 17 bp, synthetic construct
  source 1..17: mol_type = other DNA
tcgtttagtgaaccgtc

SEQ ID NO: 19204 - DNA, 16 bp, synthetic construct
  source 1..16: mol_type = other DNA
cgtttagtgaaccgtc

SEQ ID NO: 19205 - DNA, 15 bp, synthetic construct
  source 1..15: mol_type = other DNA
gtttagtgaaccgtc

SEQ ID NO: 19206 - DNA, 14 bp, synthetic construct
  source 1..14: mol_type = other DNA
tttagtgaaccgtc

SEQ ID NO: 19207 - DNA, 13 bp, synthetic construct
  source 1..13: mol_type = other DNA
ttagtgaaccgtc

SEQ ID NO: 19208 - DNA, 12 bp, synthetic construct
  source 1..12: mol_type = other DNA
tagtgaaccgtc

SEQ ID NO: 19209 - DNA, 11 bp, synthetic construct
  source 1..11: mol_type = other DNA
agtgaaccgtc

SEQ ID NO: 19210 - DNA, 10 bp, synthetic construct
  source 1..10: mol_type = other DNA
gtgaaccgtc

SEQ ID NO: 19211 - DNA, 500 bp, synthetic construct
  source 1..500: mol_type = other DNA
gcccgcctggctgaccgcccaacgacccccgcccattgacgtcaataatgacgtatgttcccatagtaacgccaatagggactttccattgacgtcaatgggtggagtatttacggtaaactgcccacttggcagtacatcaagtgtatcatatgccaagtccgccccctattgacgtcaatgacggtaaatggcccgcctggcattatgcccagtacatgaccttacgggactttcctacttggcagtacatctacgtattagtcatcgctattaccatggtgatgcggttttggcagtacaccaatgggcgtggatagcggtttgactcacggggatttccaagtctccaccccattgacgtcaatgggagtttgttttggcaccaaaatcaacgggactttccaaaatgtcgtaataaccccgccccgttgacgcaaatgggcggtaggcgtgtacggtgggaggtctatataagcagagctcgtttagtgaaccgt

SEQ ID NO: 19212 - DNA, 500 bp, synthetic construct
  source 1..500: mol_type = other DNA
ggcccgcctggctgaccgcccaacgacccccgcccattgacgtcaataatgacgtatgttcccatagtaacgccaatagggactttccattgacgtcaatgggtggagtatttacggtaaactgcccacttggcagtacatcaagtgtatcatatgccaagtccgccccctattgacgtcaatgacggtaaatggcccgcctggcattatgcccagtacatgaccttacgggactttcctacttggcagtacatctacgtattagtcatcgctattaccatggtgatgcggttttggcagtacaccaatgggcgtggatagcggtttgactcacggggatttccaagtctccaccccattgacgtcaatgggagtttgttttggcaccaaaatcaacgggactttccaaaatgtcgtaataaccccgccccgttgacgcaaatgggcggtaggcgtgtacggtgggaggtctatataagcagagctcgtttagtgaaccg

SEQ ID NO: 19213 - DNA, 500 bp, synthetic construct
  source 1..500: mol_type = other DNA
tggcccgcctggctgaccgcccaacgacccccgcccattgacgtcaataatgacgtatgttcccatagtaacgccaatagggactttccattgacgtcaatgggtggagtatttacggtaaactgcccacttggcagtacatcaagtgtatcatatgccaagtccgccccctattgacgtcaatgacggtaaatggcccgcctggcattatgcccagtacatgaccttacgggactttcctacttggcagtacatctacgtattagtcatcgctattaccatggtgatgcggttttggcagtacaccaatgggcgtggatagcggtttgactcacggggatttccaagtctccaccccattgacgtcaatgggagtttgttttggcaccaaaatcaacgggactttccaaaatgtcgtaataaccccgccccgttgacgcaaatgggcggtaggcgtgtacggtgggaggtctatataagcagagctcgtttagtgaacc

SEQ ID NO: 19214 - DNA, 500 bp, synthetic construct
  source 1..500: mol_type = other DNA
atggcccgcctggctgaccgcccaacgacccccgcccattgacgtcaataatgacgtatgttcccatagtaacgccaatagggactttccattgacgtcaatgggtggagtatttacggtaaactgcccacttggcagtacatcaagtgtatcatatgccaagtccgccccctattgacgtcaatgacggtaaatggcccgcctggcattatgcccagtacatgaccttacgggactttcctacttggcagtacatctacgtattagtcatcgctattaccatggtgatgcggttttggcagtacaccaatgggcgtggatagcggtttgactcacggggatttccaagtctccaccccattgacgtcaatgggagtttgttttggcaccaaaatcaacgggactttccaaaatgtcgtaataaccccgccccgttgacgcaaatgggcggtaggcgtgtacggtgggaggtctatataagcagagctcgtttagtgaac

SEQ ID NO: 19215 - DNA, 500 bp, synthetic construct
  source 1..500: mol_type = other DNA
aatggcccgcctggctgaccgcccaacgacccccgcccattgacgtcaataatgacgtatgttcccatagtaacgccaatagggactttccattgacgtcaatgggtggagtatttacggtaaactgcccacttggcagtacatcaagtgtatcatatgccaagtccgccccctattgacgtcaatgacggtaaatggcccgcctggcattatgcccagtacatgaccttacgggactttcctacttggcagtacatctacgtattagtcatcgctattaccatggtgatgcggttttggcagtacaccaatgggcgtggatagcggtttgactcacggggatttccaagtctccaccccattgacgtcaatgggagtttgttttggcaccaaaatcaacgggactttccaaaatgtcgtaataaccccgccccgttgacgcaaatgggcggtaggcgtgtacggtgggaggtctatataagcagagctcgtttagtgaa

SEQ ID NO: 19216 - DNA, 500 bp, synthetic construct
  source 1..500: mol_type = other DNA
aaatggcccgcctggctgaccgcccaacgacccccgcccattgacgtcaataatgacgtatgttcccatagtaacgccaatagggactttccattgacgtcaatgggtggagtatttacggtaaactgcccacttggcagtacatcaagtgtatcatatgccaagtccgccccctattgacgtcaatgacggtaaatggcccgcctggcattatgcccagtacatgaccttacgggactttcctacttggcagtacatctacgtattagtcatcgctattaccatggtgatgcggttttggcagtacaccaatgggcgtggatagcggtttgactcacggggatttccaagtctccaccccattgacgtcaatgggagtttgttttggcaccaaaatcaacgggactttccaaaatgtcgtaataaccccgccccgttgacgcaaatgggcggtaggcgtgtacggtgggaggtctatataagcagagctcgtttagtga

SEQ ID NO: 19217 - DNA, 500 bp, synthetic construct
  source 1..500: mol_type = other DNA
taaatggcccgcctggctgaccgcccaacgacccccgcccattgacgtcaataatgacgtatgttcccatagtaacgccaatagggactttccattgacgtcaatgggtggagtatttacggtaaactgcccacttggcagtacatcaagtgtatcatatgccaagtccgccccctattgacgtcaatgacggtaaatggcccgcctggcattatgcccagtacatgaccttacgggactttcctacttggcagtacatctacgtattagtcatcgctattaccatggtgatgcggttttggcagtacaccaatgggcgtggatagcggtttgactcacggggatttccaagtctccaccccattgacgtcaatgggagtttgttttggcaccaaaatcaacgggactttccaaaatgtcgtaataaccccgccccgttgacgcaaatgggcggtaggcgtgtacggtgggaggtctatataagcagagctcgtttagtg

SEQ ID NO: 19218 - DNA, 500 bp, synthetic construct
  source 1..500: mol_type = other DNA
gtaaatggcccgcctggctgaccgcccaacgacccccgcccattgacgtcaataatgacgtatgttcccatagtaacgccaatagggactttccattgacgtcaatgggtggagtatttacggtaaactgcccacttggcagtacatcaagtgtatcatatgccaagtccgccccctattgacgtcaatgacggtaaatggcccgcctggcattatgcccagtacatgaccttacgggactttcctacttggcagtacatctacgtattagtcatcgctattaccatggtgatgcggttttggcagtacaccaatgggcgtggatagcggtttgactcacggggatttccaagtctccaccccattgacgtcaatgggagtttgttttggcaccaaaatcaacgggactttccaaaatgtcgtaataaccccgccccgttgacgcaaatgggcggtaggcgtgtacggtgggaggtctatataagcagagctcgtttagt

SEQ ID NO: 19219 - DNA, 500 bp, synthetic construct
  source 1..500: mol_type = other DNA
ggtaaatggcccgcctggctgaccgcccaacgacccccgcccattgacgtcaataatgacgtatgttcccatagtaacgccaatagggactttccattgacgtcaatgggtggagtatttacggtaaactgcccacttggcagtacatcaagtgtatcatatgccaagtccgccccctattgacgtcaatgacggtaaatggcccgcctggcattatgcccagtacatgaccttacgggactttcctacttggcagtacatctacgtattagtcatcgctattaccatggtgatgcggttttggcagtacaccaatgggcgtggatagcggtttgactcacggggatttccaagtctccaccccattgacgtcaatgggagtttgttttggcaccaaaatcaacgggactttccaaaatgtcgtaataaccccgccccgttgacgcaaatgggcggtaggcgtgtacggtgggaggtctatataagcagagctcgtttag

SEQ ID NO: 19220 - DNA, 500 bp, synthetic construct
  source 1..500: mol_type = other DNA
cggtaaatggcccgcctggctgaccgcccaacgacccccgcccattgacgtcaataatgacgtatgttcccatagtaacgccaatagggactttccattgacgtcaatgggtggagtatttacggtaaactgcccacttggcagtacatcaagtgtatcatatgccaagtccgccccctattgacgtcaatgacggtaaatggcccgcctggcattatgcccagtacatgaccttacgggactttcctacttggcagtacatctacgtattagtcatcgctattaccatggtgatgcggttttggcagtacaccaatgggcgtggatagcggtttgactcacggggatttccaagtctccaccccattgacgtcaatgggagtttgttttggcaccaaaatcaacgggactttccaaaatgtcgtaataaccccgccccgttgacgcaaatgggcggtaggcgtgtacggtgggaggtctatataagcagagctcgttta

SEQ ID NO: 19221 - DNA, 500 bp, synthetic construct
  source 1..500: mol_type = other DNA
acggtaaatggcccgcctggctgaccgcccaacgacccccgcccattgacgtcaataatgacgtatgttcccatagtaacgccaatagggactttccattgacgtcaatgggtggagtatttacggtaaactgcccacttggcagtacatcaagtgtatcatatgccaagtccgccccctattgacgtcaatgacggtaaatggcccgcctggcattatgcccagtacatgaccttacgggactttcctacttggcagtacatctacgtattagtcatcgctattaccatggtgatgcggttttggcagtacaccaatgggcgtggatagcggtttgactcacggggatttccaagtctccaccccattgacgtcaatgggagtttgttttggcaccaaaatcaacgggactttccaaaatgtcgtaataaccccgccccgttgacgcaaatgggcggtaggcgtgtacggtgggaggtctatataagcagagctcgttt

SEQ ID NO: 19222 - DNA, 500 bp, synthetic construct
  source 1..500: mol_type = other DNA
tacggtaaatggcccgcctggctgaccgcccaacgacccccgcccattgacgtcaataatgacgtatgttcccatagtaacgccaatagggactttccattgacgtcaatgggtggagtatttacggtaaactgcccacttggcagtacatcaagtgtatcatatgccaagtccgccccctattgacgtcaatgacggtaaatggcccgcctggcattatgcccagtacatgaccttacgggactttcctacttggcagtacatctacgtattagtcatcgctattaccatggtgatgcggttttggcagtacaccaatgggcgtggatagcggtttgactcacggggatttccaagtctccaccccattgacgtcaatgggagtttgttttggcaccaaaatcaacgggactttccaaaatgtcgtaataaccccgccccgttgacgcaaatgggcggtaggcgtgtacggtgggaggtctatataagcagagctcgtt

SEQ ID NO: 19223 - DNA, 500 bp, synthetic construct
  source 1..500: mol_type = other DNA
ttacggtaaatggcccgcctggctgaccgcccaacgacccccgcccattgacgtcaataatgacgtatgttcccatagtaacgccaatagggactttccattgacgtcaatgggtggagtatttacggtaaactgcccacttggcagtacatcaagtgtatcatatgccaagtccgccccctattgacgtcaatgacggtaaatggcccgcctggcattatgcccagtacatgaccttacgggactttcctacttggcagtacatctacgtattagtcatcgctattaccatggtgatgcggttttggcagtacaccaatgggcgtggatagcggtttgactcacggggatttccaagtctccaccccattgacgtcaatgggagtttgttttggcaccaaaatcaacgggactttccaaaatgtcgtaataaccccgccccgttgacgcaaatgggcggtaggcgtgtacggtgggaggtctatataagcagagctcgt

SEQ ID NO: 19224 - DNA, 500 bp, synthetic construct
  source 1..500: mol_type = other DNA
cttacggtaaatggcccgcctggctgaccgcccaacgacccccgcccattgacgtcaataatgacgtatgttcccatagtaacgccaatagggactttccattgacgtcaatgggtggagtatttacggtaaactgcccacttggcagtacatcaagtgtatcatatgccaagtccgccccctattgacgtcaatgacggtaaatggcccgcctggcattatgcccagtacatgaccttacgggactttcctacttggcagtacatctacgtattagtcatcgctattaccatggtgatgcggttttggcagtacaccaatgggcgtggatagcggtttgactcacggggatttccaagtctccaccccattgacgtcaatgggagtttgttttggcaccaaaatcaacgggactttccaaaatgtcgtaataaccccgccccgttgacgcaaatgggcggtaggcgtgtacggtgggaggtctatataagcagagctcg

SEQ ID NO: 19225 - DNA, 500 bp, synthetic construct
  source 1..500: mol_type = other DNA
acttacggtaaatggcccgcctggctgaccgcccaacgacccccgcccattgacgtcaataatgacgtatgttcccatagtaacgccaatagggactttccattgacgtcaatgggtggagtatttacggtaaactgcccacttggcagtacatcaagtgtatcatatgccaagtccgccccctattgacgtcaatgacggtaaatggcccgcctggcattatgcccagtacatgaccttacgggactttcctacttggcagtacatctacgtattagtcatcgctattaccatggtgatgcggttttggcagtacaccaatgggcgtggatagcggtttgactcacggggatttccaagtctccaccccattgacgtcaatgggagtttgttttggcaccaaaatcaacgggactttccaaaatgtcgtaataaccccgccccgttgacgcaaatgggcggtaggcgtgtacggtgggaggtctatataagcagagctc

SEQ ID NO: 19226 - DNA, 500 bp, synthetic construct
  source 1..500: mol_type = other DNA
aacttacggtaaatggcccgcctggctgaccgcccaacgacccccgcccattgacgtcaataatgacgtatgttcccatagtaacgccaatagggactttccattgacgtcaatgggtggagtatttacggtaaactgcccacttggcagtacatcaagtgtatcatatgccaagtccgccccctattgacgtcaatgacggtaaatggcccgcctggcattatgcccagtacatgaccttacgggactttcctacttggcagtacatctacgtattagtcatcgctattaccatggtgatgcggttttggcagtacaccaatgggcgtggatagcggtttgactcacggggatttccaagtctccaccccattgacgtcaatgggagtttgttttggcaccaaaatcaacgggactttccaaaatgtcgtaataaccccgccccgttgacgcaaatgggcggtaggcgtgtacggtgggaggtctatataagcagagct

SEQ ID NO: 19227 - DNA, 500 bp, synthetic construct
  source 1..500: mol_type = other DNA
taacttacggtaaatggcccgcctggctgaccgcccaacgacccccgcccattgacgtcaataatgacgtatgttcccatagtaacgccaatagggactttccattgacgtcaatgggtggagtatttacggtaaactgcccacttggcagtacatcaagtgtatcatatgccaagtccgccccctattgacgtcaatgacggtaaatggcccgcctggcattatgcccagtacatgaccttacgggactttcctacttggcagtacatctacgtattagtcatcgctattaccatggtgatgcggttttggcagtacaccaatgggcgtggatagcggtttgactcacggggatttccaagtctccaccccattgacgtcaatgggagtttgttttggcaccaaaatcaacgggactttccaaaatgtcgtaataaccccgccccgttgacgcaaatgggcggtaggcgtgtacggtgggaggtctatataagcagagc

SEQ ID NO: 19228 - DNA, 500 bp, synthetic construct
  source 1..500: mol_type = other DNA
ataacttacggtaaatggcccgcctggctgaccgcccaacgacccccgcccattgacgtcaataatgacgtatgttcccatagtaacgccaatagggactttccattgacgtcaatgggtggagtatttacggtaaactgcccacttggcagtacatcaagtgtatcatatgccaagtccgccccctattgacgtcaatgacggtaaatggcccgcctggcattatgcccagtacatgaccttacgggactttcctacttggcagtacatctacgtattagtcatcgctattaccatggtgatgcggttttggcagtacaccaatgggcgtggatagcggtttgactcacggggatttccaagtctccaccccattgacgtcaatgggagtttgttttggcaccaaaatcaacgggactttccaaaatgtcgtaataaccccgccccgttgacgcaaatgggcggtaggcgtgtacggtgggaggtctatataagcagag

SEQ ID NO: 19229 - DNA, 500 bp, synthetic construct
  source 1..500: mol_type = other DNA
cataacttacggtaaatggcccgcctggctgaccgcccaacgacccccgcccattgacgtcaataatgacgtatgttcccatagtaacgccaatagggactttccattgacgtcaatgggtggagtatttacggtaaactgcccacttggcagtacatcaagtgtatcatatgccaagtccgccccctattgacgtcaatgacggtaaatggcccgcctggcattatgcccagtacatgaccttacgggactttcctacttggcagtacatctacgtattagtcatcgctattaccatggtgatgcggttttggcagtacaccaatgggcgtggatagcggtttgactcacggggatttccaagtctccaccccattgacgtcaatgggagtttgttttggcaccaaaatcaacgggactttccaaaatgtcgtaataaccccgccccgttgacgcaaatgggcggtaggcgtgtacggtgggaggtctatataagcaga

SEQ ID NO: 19230 - DNA, 500 bp, synthetic construct
  source 1..500: mol_type = other DNA
acataacttacggtaaatggcccgcctggctgaccgcccaacgacccccgcccattgacgtcaataatgacgtatgttcccatagtaacgccaatagggactttccattgacgtcaatgggtggagtatttacggtaaactgcccacttggcagtacatcaagtgtatcatatgccaagtccgccccctattgacgtcaatgacggtaaatggcccgcctggcattatgcccagtacatgaccttacgggactttcctacttggcagtacatctacgtattagtcatcgctattaccatggtgatgcggttttggcagtacaccaatgggcgtggatagcggtttgactcacggggatttccaagtctccaccccattgacgtcaatgggagtttgttttggcaccaaaatcaacgggactttccaaaatgtcgtaataaccccgccccgttgacgcaaatgggcggtaggcgtgtacggtgggaggtctatataagcag

SEQ ID NO: 19231 - DNA, 500 bp, synthetic construct
  source 1..500: mol_type = other DNA
atctacgtattagtcatcgctattaccatggtgatgcggttttggcagtacaccaatgggcgtggatagcggtttgactcacggggatttccaagtctccaccccattgacgtcaatgggagtttgttttggcaccaaaatcaacgggactttccaaaatgtcgtaataaccccgccccgttgacgcaaatgggcggtaggcgtgtacggtgggaggtctatataagcagagctcgtttagtgaaccgtcagaattttgtaatacgactcactatagggcggccgggaattcgccaccatggtgagcaagggcgaggagctgttcaccggggtggtgcccatcctggtcgagctggacggcgacgtaaacggccacaagttcagcgtgtccggcgagggcgagggcgatgccacctacggcaagctgaccctgaagttcatctgcaccaccggcaagctgcccgtgccctggcccaccctcgtgaccaccctgacgtacg

SEQ ID NO: 19232 - DNA, 500 bp, synthetic construct
  source 1..500: mol_type = other DNA
catctacgtattagtcatcgctattaccatggtgatgcggttttggcagtacaccaatgggcgtggatagcggtttgactcacggggatttccaagtctccaccccattgacgtcaatgggagtttgttttggcaccaaaatcaacgggactttccaaaatgtcgtaataaccccgccccgttgacgcaaatgggcggtaggcgtgtacggtgggaggtctatataagcagagctcgtttagtgaaccgtcagaattttgtaatacgactcactatagggcggccgggaattcgccaccatggtgagcaagggcgaggagctgttcaccggggtggtgcccatcctggtcgagctggacggcgacgtaaacggccacaagttcagcgtgtccggcgagggcgagggcgatgccacctacggcaagctgaccctgaagttcatctgcaccaccggcaagctgcccgtgccctggcccaccctcgtgaccaccctgacgtac

SEQ ID NO: 19233 - DNA, 500 bp, synthetic construct
  source 1..500: mol_type = other DNA
acatctacgtattagtcatcgctattaccatggtgatgcggttttggcagtacaccaatgggcgtggatagcggtttgactcacggggatttccaagtctccaccccattgacgtcaatgggagtttgttttggcaccaaaatcaacgggactttccaaaatgtcgtaataaccccgccccgttgacgcaaatgggcggtaggcgtgtacggtgggaggtctatataagcagagctcgtttagtgaaccgtcagaattttgtaatacgactcactatagggcggccgggaattcgccaccatggtgagcaagggcgaggagctgttcaccggggtggtgcccatcctggtcgagctggacggcgacgtaaacggccacaagttcagcgtgtccggcgagggcgagggcgatgccacctacggcaagctgaccctgaagttcatctgcaccaccggcaagctgcccgtgccctggcccaccctcgtgaccaccctgacgta

SEQ ID NO: 19234 - DNA, 500 bp, synthetic construct
  source 1..500: mol_type = other DNA
tacatctacgtattagtcatcgctattaccatggtgatgcggttttggcagtacaccaatgggcgtggatagcggtttgactcacggggatttccaagtctccaccccattgacgtcaatgggagtttgttttggcaccaaaatcaacgggactttccaaaatgtcgtaataaccccgccccgttgacgcaaatgggcggtaggcgtgtacggtgggaggtctatataagcagagctcgtttagtgaaccgtcagaattttgtaatacgactcactatagggcggccgggaattcgccaccatggtgagcaagggcgaggagctgttcaccggggtggtgcccatcctggtcgagctggacggcgacgtaaacggccacaagttcagcgtgtccggcgagggcgagggcgatgccacctacggcaagctgaccctgaagttcatctgcaccaccggcaagctgcccgtgccctggcccaccctcgtgaccaccctgacgt

SEQ ID NO: 19235 - DNA, 500 bp, synthetic construct
  source 1..500: mol_type = other DNA
gtacatctacgtattagtcatcgctattaccatggtgatgcggttttggcagtacaccaatgggcgtggatagcggtttgactcacggggatttccaagtctccaccccattgacgtcaatgggagtttgttttggcaccaaaatcaacgggactttccaaaatgtcgtaataaccccgccccgttgacgcaaatgggcggtaggcgtgtacggtgggaggtctatataagcagagctcgtttagtgaaccgtcagaattttgtaatacgactcactatagggcggccgggaattcgccaccatggtgagcaagggcgaggagctgttcaccggggtggtgcccatcctggtcgagctggacggcgacgtaaacggccacaagttcagcgtgtccggcgagggcgagggcgatgccacctacggcaagctgaccctgaagttcatctgcaccaccggcaagctgcccgtgccctggcccaccctcgtgaccaccctgacg

SEQ ID NO: 19236 - DNA, 500 bp, synthetic construct
  source 1..500: mol_type = other DNA
agtacatctacgtattagtcatcgctattaccatggtgatgcggttttggcagtacaccaatgggcgtggatagcggtttgactcacggggatttccaagtctccaccccattgacgtcaatgggagtttgttttggcaccaaaatcaacgggactttccaaaatgtcgtaataaccccgccccgttgacgcaaatgggcggtaggcgtgtacggtgggaggtctatataagcagagctcgtttagtgaaccgtcagaattttgtaatacgactcactatagggcggccgggaattcgccaccatggtgagcaagggcgaggagctgttcaccggggtggtgcccatcctggtcgagctggacggcgacgtaaacggccacaagttcagcgtgtccggcgagggcgagggcgatgccacctacggcaagctgaccctgaagttcatctgcaccaccggcaagctgcccgtgccctggcccaccctcgtgaccaccctgac

SEQ ID NO: 19237 - DNA, 500 bp, synthetic construct
  source 1..500: mol_type = other DNA
cagtacatctacgtattagtcatcgctattaccatggtgatgcggttttggcagtacaccaatgggcgtggatagcggtttgactcacggggatttccaagtctccaccccattgacgtcaatgggagtttgttttggcaccaaaatcaacgggactttccaaaatgtcgtaataaccccgccccgttgacgcaaatgggcggtaggcgtgtacggtgggaggtctatataagcagagctcgtttagtgaaccgtcagaattttgtaatacgactcactatagggcggccgggaattcgccaccatggtgagcaagggcgaggagctgttcaccggggtggtgcccatcctggtcgagctggacggcgacgtaaacggccacaagttcagcgtgtccggcgagggcgagggcgatgccacctacggcaagctgaccctgaagttcatctgcaccaccggcaagctgcccgtgccctggcccaccctcgtgaccaccctga

SEQ ID NO: 19238 - DNA, 500 bp, synthetic construct
  source 1..500: mol_type = other DNA
gcagtacatctacgtattagtcatcgctattaccatggtgatgcggttttggcagtacaccaatgggcgtggatagcggtttgactcacggggatttccaagtctccaccccattgacgtcaatgggagtttgttttggcaccaaaatcaacgggactttccaaaatgtcgtaataaccccgccccgttgacgcaaatgggcggtaggcgtgtacggtgggaggtctatataagcagagctcgtttagtgaaccgtcagaattttgtaatacgactcactatagggcggccgggaattcgccaccatggtgagcaagggcgaggagctgttcaccggggtggtgcccatcctggtcgagctggacggcgacgtaaacggccacaagttcagcgtgtccggcgagggcgagggcgatgccacctacggcaagctgaccctgaagttcatctgcaccaccggcaagctgcccgtgccctggcccaccctcgtgaccaccctg

SEQ ID NO: 19239 - DNA, 500 bp, synthetic construct
  source 1..500: mol_type = other DNA
ggcagtacatctacgtattagtcatcgctattaccatggtgatgcggttttggcagtacaccaatgggcgtggatagcggtttgactcacggggatttccaagtctccaccccattgacgtcaatgggagtttgttttggcaccaaaatcaacgggactttccaaaatgtcgtaataaccccgccccgttgacgcaaatgggcggtaggcgtgtacggtgggaggtctatataagcagagctcgtttagtgaaccgtcagaattttgtaatacgactcactatagggcggccgggaattcgccaccatggtgagcaagggcgaggagctgttcaccggggtggtgcccatcctggtcgagctggacggcgacgtaaacggccacaagttcagcgtgtccggcgagggcgagggcgatgccacctacggcaagctgaccctgaagttcatctgcaccaccggcaagctgcccgtgccctggcccaccctcgtgaccaccct

SEQ ID NO: 19240 - DNA, 500 bp, synthetic construct
  source 1..500: mol_type = other DNA
tggcagtacatctacgtattagtcatcgctattaccatggtgatgcggttttggcagtacaccaatgggcgtggatagcggtttgactcacggggatttccaagtctccaccccattgacgtcaatgggagtttgttttggcaccaaaatcaacgggactttccaaaatgtcgtaataaccccgccccgttgacgcaaatgggcggtaggcgtgtacggtgggaggtctatataagcagagctcgtttagtgaaccgtcagaattttgtaatacgactcactatagggcggccgggaattcgccaccatggtgagcaagggcgaggagctgttcaccggggtggtgcccatcctggtcgagctggacggcgacgtaaacggccacaagttcagcgtgtccggcgagggcgagggcgatgccacctacggcaagctgaccctgaagttcatctgcaccaccggcaagctgcccgtgccctggcccaccctcgtgaccaccc

SEQ ID NO: 19241 - DNA, 500 bp, synthetic construct
  source 1..500: mol_type = other DNA
ttggcagtacatctacgtattagtcatcgctattaccatggtgatgcggttttggcagtacaccaatgggcgtggatagcggtttgactcacggggatttccaagtctccaccccattgacgtcaatgggagtttgttttggcaccaaaatcaacgggactttccaaaatgtcgtaataaccccgccccgttgacgcaaatgggcggtaggcgtgtacggtgggaggtctatataagcagagctcgtttagtgaaccgtcagaattttgtaatacgactcactatagggcggccgggaattcgccaccatggtgagcaagggcgaggagctgttcaccggggtggtgcccatcctggtcgagctggacggcgacgtaaacggccacaagttcagcgtgtccggcgagggcgagggcgatgccacctacggcaagctgaccctgaagttcatctgcaccaccggcaagctgcccgtgccctggcccaccctcgtgaccacc

SEQ ID NO: 19242 - DNA, 500 bp, synthetic construct
  source 1..500: mol_type = other DNA
cttggcagtacatctacgtattagtcatcgctattaccatggtgatgcggttttggcagtacaccaatgggcgtggatagcggtttgactcacggggatttccaagtctccaccccattgacgtcaatgggagtttgttttggcaccaaaatcaacgggactttccaaaatgtcgtaataaccccgccccgttgacgcaaatgggcggtaggcgtgtacggtgggaggtctatataagcagagctcgtttagtgaaccgtcagaattttgtaatacgactcactatagggcggccgggaattcgccaccatggtgagcaagggcgaggagctgttcaccggggtggtgcccatcctggtcgagctggacggcgacgtaaacggccacaagttcagcgtgtccggcgagggcgagggcgatgccacctacggcaagctgaccctgaagttcatctgcaccaccggcaagctgcccgtgccctggcccaccctcgtgaccac

SEQ ID NO: 19243 - DNA, 500 bp, synthetic construct
  source 1..500: mol_type = other DNA
acttggcagtacatctacgtattagtcatcgctattaccatggtgatgcggttttggcagtacaccaatgggcgtggatagcggtttgactcacggggatttccaagtctccaccccattgacgtcaatgggagtttgttttggcaccaaaatcaacgggactttccaaaatgtcgtaataaccccgccccgttgacgcaaatgggcggtaggcgtgtacggtgggaggtctatataagcagagctcgtttagtgaaccgtcagaattttgtaatacgactcactatagggcggccgggaattcgccaccatggtgagcaagggcgaggagctgttcaccggggtggtgcccatcctggtcgagctggacggcgacgtaaacggccacaagttcagcgtgtccggcgagggcgagggcgatgccacctacggcaagctgaccctgaagttcatctgcaccaccggcaagctgcccgtgccctggcccaccctcgtgacca

SEQ ID NO: 19244 - DNA, 500 bp, synthetic construct
  source 1..500: mol_type = other DNA
tacttggcagtacatctacgtattagtcatcgctattaccatggtgatgcggttttggcagtacaccaatgggcgtggatagcggtttgactcacggggatttccaagtctccaccccattgacgtcaatgggagtttgttttggcaccaaaatcaacgggactttccaaaatgtcgtaataaccccgccccgttgacgcaaatgggcggtaggcgtgtacggtgggaggtctatataagcagagctcgtttagtgaaccgtcagaattttgtaatacgactcactatagggcggccgggaattcgccaccatggtgagcaagggcgaggagctgttcaccggggtggtgcccatcctggtcgagctggacggcgacgtaaacggccacaagttcagcgtgtccggcgagggcgagggcgatgccacctacggcaagctgaccctgaagttcatctgcaccaccggcaagctgcccgtgccctggcccaccctcgtgacc

SEQ ID NO: 19245 - DNA, 500 bp, synthetic construct
  source 1..500: mol_type = other DNA
ctacttggcagtacatctacgtattagtcatcgctattaccatggtgatgcggttttggcagtacaccaatgggcgtggatagcggtttgactcacggggatttccaagtctccaccccattgacgtcaatgggagtttgttttggcaccaaaatcaacgggactttccaaaatgtcgtaataaccccgccccgttgacgcaaatgggcggtaggcgtgtacggtgggaggtctatataagcagagctcgtttagtgaaccgtcagaattttgtaatacgactcactatagggcggccgggaattcgccaccatggtgagcaagggcgaggagctgttcaccggggtggtgcccatcctggtcgagctggacggcgacgtaaacggccacaagttcagcgtgtccggcgagggcgagggcgatgccacctacggcaagctgaccctgaagttcatctgcaccaccggcaagctgcccgtgccctggcccaccctcgtgac

SEQ ID NO: 19246 - DNA, 500 bp, synthetic construct
  source 1..500: mol_type = other DNA
cctacttggcagtacatctacgtattagtcatcgctattaccatggtgatgcggttttggcagtacaccaatgggcgtggatagcggtttgactcacggggatttccaagtctccaccccattgacgtcaatgggagtttgttttggcaccaaaatcaacgggactttccaaaatgtcgtaataaccccgccccgttgacgcaaatgggcggtaggcgtgtacggtgggaggtctatataagcagagctcgtttagtgaaccgtcagaattttgtaatacgactcactatagggcggccgggaattcgccaccatggtgagcaagggcgaggagctgttcaccggggtggtgcccatcctggtcgagctggacggcgacgtaaacggccacaagttcagcgtgtccggcgagggcgagggcgatgccacctacggcaagctgaccctgaagttcatctgcaccaccggcaagctgcccgtgccctggcccaccctcgtga

SEQ ID NO: 19247 - DNA, 500 bp, synthetic construct
  source 1..500: mol_type = other DNA
tcctacttggcagtacatctacgtattagtcatcgctattaccatggtgatgcggttttggcagtacaccaatgggcgtggatagcggtttgactcacggggatttccaagtctccaccccattgacgtcaatgggagtttgttttggcaccaaaatcaacgggactttccaaaatgtcgtaataaccccgccccgttgacgcaaatgggcggtaggcgtgtacggtgggaggtctatataagcagagctcgtttagtgaaccgtcagaattttgtaatacgactcactatagggcggccgggaattcgccaccatggtgagcaagggcgaggagctgttcaccggggtggtgcccatcctggtcgagctggacggcgacgtaaacggccacaagttcagcgtgtccggcgagggcgagggcgatgccacctacggcaagctgaccctgaagttcatctgcaccaccggcaagctgcccgtgccctggcccaccctcgtg

SEQ ID NO: 19248 - DNA, 500 bp, synthetic construct
  source 1..500: mol_type = other DNA
ttcctacttggcagtacatctacgtattagtcatcgctattaccatggtgatgcggttttggcagtacaccaatgggcgtggatagcggtttgactcacggggatttccaagtctccaccccattgacgtcaatgggagtttgttttggcaccaaaatcaacgggactttccaaaatgtcgtaataaccccgccccgttgacgcaaatgggcggtaggcgtgtacggtgggaggtctatataagcagagctcgtttagtgaaccgtcagaattttgtaatacgactcactatagggcggccgggaattcgccaccatggtgagcaagggcgaggagctgttcaccggggtggtgcccatcctggtcgagctggacggcgacgtaaacggccacaagttcagcgtgtccggcgagggcgagggcgatgccacctacggcaagctgaccctgaagttcatctgcaccaccggcaagctgcccgtgccctggcccaccctcgt

SEQ ID NO: 19249 - DNA, 500 bp, synthetic construct
  source 1..500: mol_type = other DNA
tttcctacttggcagtacatctacgtattagtcatcgctattaccatggtgatgcggttttggcagtacaccaatgggcgtggatagcggtttgactcacggggatttccaagtctccaccccattgacgtcaatgggagtttgttttggcaccaaaatcaacgggactttccaaaatgtcgtaataaccccgccccgttgacgcaaatgggcggtaggcgtgtacggtgggaggtctatataagcagagctcgtttagtgaaccgtcagaattttgtaatacgactcactatagggcggccgggaattcgccaccatggtgagcaagggcgaggagctgttcaccggggtggtgcccatcctggtcgagctggacggcgacgtaaacggccacaagttcagcgtgtccggcgagggcgagggcgatgccacctacggcaagctgaccctgaagttcatctgcaccaccggcaagctgcccgtgccctggcccaccctcg

SEQ ID NO: 19250 - DNA, 500 bp, synthetic construct
  source 1..500: mol_type = other DNA
ctttcctacttggcagtacatctacgtattagtcatcgctattaccatggtgatgcggttttggcagtacaccaatgggcgtggatagcggtttgactcacggggatttccaagtctccaccccattgacgtcaatgggagtttgttttggcaccaaaatcaacgggactttccaaaatgtcgtaataaccccgccccgttgacgcaaatgggcggtaggcgtgtacggtgggaggtctatataagcagagctcgtttagtgaaccgtcagaattttgtaatacgactcactatagggcggccgggaattcgccaccatggtgagcaagggcgaggagctgttcaccggggtggtgcccatcctggtcgagctggacggcgacgtaaacggccacaagttcagcgtgtccggcgagggcgagggcgatgccacctacggcaagctgaccctgaagttcatctgcaccaccggcaagctgcccgtgccctggcccaccctc

SEQ ID NO: 19251 - DNA, 500 bp, synthetic construct
  source 1..500: mol_type = other DNA
actttcctacttggcagtacatctacgtattagtcatcgctattaccatggtgatgcggttttggcagtacaccaatgggcgtggatagcggtttgactcacggggatttccaagtctccaccccattgacgtcaatgggagtttgttttggcaccaaaatcaacgggactttccaaaatgtcgtaataaccccgccccgttgacgcaaatgggcggtaggcgtgtacggtgggaggtctatataagcagagctcgtttagtgaaccgtcagaattttgtaatacgactcactatagggcggccgggaattcgccaccatggtgagcaagggcgaggagctgttcaccggggtggtgcccatcctggtcgagctggacggcgacgtaaacggccacaagttcagcgtgtccggcgagggcgagggcgatgccacctacggcaagctgaccctgaagttcatctgcaccaccggcaagctgcccgtgccctggcccaccct

SEQ ID NO: 19252 - DNA, 10 bp, synthetic construct
  source 1..10: mol_type = other DNA
gcgtgcagtg

SEQ ID NO: 19253 - DNA, 11 bp, synthetic construct
  source 1..11: mol_type = other DNA
gcgtgcagtgc

SEQ ID NO: 19254 - DNA, 12 bp, synthetic construct
  source 1..12: mol_type = other DNA
gcgtgcagtgct

SEQ ID NO: 19255 - DNA, 13 bp, synthetic construct
  source 1..13: mol_type = other DNA
gcgtgcagtgctt

SEQ ID NO: 19256 - DNA, 14 bp, synthetic construct
  source 1..14: mol_type = other DNA
gcgtgcagtgcttc

SEQ ID NO: 19257 - DNA, 15 bp, synthetic construct
  source 1..15: mol_type = other DNA
gcgtgcagtgcttcg

SEQ ID NO: 19258 - DNA, 16 bp, synthetic construct
  source 1..16: mol_type = other DNA
gcgtgcagtgcttcgg

SEQ ID NO: 19259 - DNA, 17 bp, synthetic construct
  source 1..17: mol_type = other DNA
gcgtgcagtgcttcggc

SEQ ID NO: 19260 - DNA, 20 bp, synthetic construct
  source 1..20: mol_type = other DNA
cagtacatgaccttacggga

SEQ ID NO: 19261 - DNA, 16 bp, synthetic construct
  source 1..16: mol_type = other DNA
acatgaccttacggga

SEQ ID NO: 19262 - DNA, 62 bp, synthetic construct
  source 1..62: mol_type = other DNA
cactcctccccatcctctccctctgtccctctgtccctctgaccctgcactgtcccagcacc

SEQ ID NO: 19263 - DNA, 122 bp, synthetic construct
  source 1..122: mol_type = other DNA
caggacacagccttggatcaggacagagacttgggggccatcctgcccctccaacccgacatgtgtacctcagctttttccctcacttgcatcaataaagcttctgtgtttggaacagctaa

SEQ ID NO: 19264 - RNA, 47 nt, synthetic construct
  source 1..47: mol_type = other RNA
gggaaataagagagaaaagaagagtaagaagaaatataagagccacc

SEQ ID NO: 19265 - RNA, 110 nt, synthetic construct
  source 1..110: mol_type = other RNA
tgataataggctggagcctcggtggccatgcttcttgccccttgggcctccccccagcccctcctccccttcctgcacccgtacccccgtggtctttgaataaagtctga

SEQ ID NO: 19266 - RNA, 100 nt, synthetic construct
  source 1..100: mol_type = other RNA
  misc_difference 1..100: note = This sequence may encompass 5, 10, 20, 30, 50, 70, or 100 nucleotides
aaaaaaaaaaaaaaaaaaaaaaaaaaaaaaaaaaaaaaaaaaaaaaaaaaaaaaaaaaaaaaaaaaaaaaaaaaaaaaaaaaaaaaaaaaaaaaaaaaaa

SEQ ID NO: 19267 - DNA, 249 bp, synthetic construct
  source 1..249: mol_type = other DNA
cgcggttctatctagttacgcgttaaaccaactagaatggtgcccatcctggtcgagctggacggcgacgtaaacggccacaagttcagcgtgtccggcgagggcgagggcgatgccacctacggcaagctgaccctgaagttcatctgcaccaccggcaagctgcccgtgccctggcccaccctcgtgaccaccctgacgtacggcgtgcagtgcttacatacaagcacatgaggatcacccatgtgc

SEQ ID NO: 19268 - DNA, 288 bp, synthetic construct
  source 1..288: mol_type = other DNA
gttttagagctagaaatagcaagttaaaataaggctagtccgttatcaacttgaaaaagtggcaccgagtcggtgctggtgcccatcctggtcgagctggacggcgacgtaaacggccacaagttcagcgtgtccggcgagggcgagggcgatgccacctacggcaagctgaccctgaagttcatctgcaccaccggcaagctgcccgtgccctggcccaccctcgtgaccaccctgacgtacggcgtgcagtgcttacatacaagcacatgaggatcacccatgtgc

SEQ ID NO: 19269 - DNA, 303 bp, synthetic construct
  source 1..303: mol_type = other DNA
agctgttcaccgggggttttagagctagaaatagcaagttaaaataaggctagtccgttatcaacttgaaaaagtggcaccgagtcggtgctggtgcccatcctggtcgagctggacggcgacgtaaacggccacaagttcagcgtgtccggcgagggcgagggcgatgccacctacggcaagctgaccctgaagttcatctgcaccaccggcaagctgcccgtgccctggcccaccctcgtgaccaccctgacgtacggcgtgcagtgcttacatacaagcacatgaggatcacccatgtgc

SEQ ID NO: 19270 - DNA, 308 bp, synthetic construct
  source 1..308: mol_type = other DNA
cgaggagctgttcaccgggggttttagagctagaaatagcaagttaaaataaggctagtccgttatcaacttgaaaaagtggcaccgagtcggtgctggtgcccatcctggtcgagctggacggcgacgtaaacggccacaagttcagcgtgtccggcgagggcgagggcgatgccacctacggcaagctgaccctgaagttcatctgcaccaccggcaagctgcccgtgccctggcccaccctcgtgaccaccctgacgtacggcgtgcagtgcttacatacaagcacatgaggatcacccatgtgc

SEQ ID NO: 19271 - DNA, 303 bp, synthetic construct
  source 1..303: mol_type = other DNA
tggtgagcaagggcggttttagagctagaaatagcaagttaaaataaggctagtccgttatcaacttgaaaaagtggcaccgagtcggtgctggtgcccatcctggtcgagctggacggcgacgtaaacggccacaagttcagcgtgtccggcgagggcgagggcgatgccacctacggcaagctgaccctgaagttcatctgcaccaccggcaagctgcccgtgccctggcccaccctcgtgaccaccctgacgtacggcgtgcagtgcttacatacaagcacatgaggatcacccatgtgc

SEQ ID NO: 19272 - DNA, 308 bp, synthetic construct
  source 1..308: mol_type = other DNA
caccatggtgagcaagggcggttttagagctagaaatagcaagttaaaataaggctagtccgttatcaacttgaaaaagtggcaccgagtcggtgctggtgcccatcctggtcgagctggacggcgacgtaaacggccacaagttcagcgtgtccggcgagggcgagggcgatgccacctacggcaagctgaccctgaagttcatctgcaccaccggcaagctgcccgtgccctggcccaccctcgtgaccaccctgacgtacggcgtgcagtgcttacatacaagcacatgaggatcacccatgtgc

SEQ ID NO: 19273 - DNA, 303 bp, synthetic construct
  source 1..303: mol_type = other DNA
ccaccgccgccaccagttttagagctagaaatagcaagttaaaataaggctagtccgttatcaacttgaaaaagtggcaccgagtcggtgctggtgcccatcctggtcgagctggacggcgacgtaaacggccacaagttcagcgtgtccggcgagggcgagggcgatgccacctacggcaagctgaccctgaagttcatctgcaccaccggcaagctgcccgtgccctggcccaccctcgtgaccaccctgacgtacggcgtgcagtgcttacatacaagcacatgaggatcacccatgtgc

SEQ ID NO: 19274 - DNA, 308 bp, synthetic construct
  source 1..308: mol_type = other DNA
tcgagccaccgccgccaccagttttagagctagaaatagcaagttaaaataaggctagtccgttatcaacttgaaaaagtggcaccgagtcggtgctggtgcccatcctggtcgagctggacggcgacgtaaacggccacaagttcagcgtgtccggcgagggcgagggcgatgccacctacggcaagctgaccctgaagttcatctgcaccaccggcaagctgcccgtgccctggcccaccctcgtgaccaccctgacgtacggcgtgcagtgcttacatacaagcacatgaggatcacccatgtgc

SEQ ID NO: 19275 - DNA, 303 bp, synthetic construct
  source 1..303: mol_type = other DNA
cacgccgtaggggatgttttagagctagaaatagcaagttaaaataaggctagtccgttatcaacttgaaaaagtggcaccgagtcggtgctggtgcccatcctggtcgagctggacggcgacgtaaacggccacaagttcagcgtgtccggcgagggcgagggcgatgccacctacggcaagctgaccctgaagttcatctgcaccaccggcaagctgcccgtgccctggcccaccctcgtgaccaccctgacgtacggcgtgcagtgcttacatacaagcacatgaggatcacccatgtgc

SEQ ID NO: 19276 - DNA, 308 bp, synthetic construct
  source 1..308: mol_type = other DNA
cactgcacgccgtaggggatgttttagagctagaaatagcaagttaaaataaggctagtccgttatcaacttgaaaaagtggcaccgagtcggtgctggtgcccatcctggtcgagctggacggcgacgtaaacggccacaagttcagcgtgtccggcgagggcgagggcgatgccacctacggcaagctgaccctgaagttcatctgcaccaccggcaagctgcccgtgccctggcccaccctcgtgaccaccctgacgtacggcgtgcagtgcttacatacaagcacatgaggatcacccatgtgc

SEQ ID NO: 19277 - DNA, 303 bp, synthetic construct
  source 1..303: mol_type = other DNA
ggatgggcaccacccgttttagagctagaaatagcaagttaaaataaggctagtccgttatcaacttgaaaaagtggcaccgagtcggtgctggtgcccatcctggtcgagctggacggcgacgtaaacggccacaagttcagcgtgtccggcgagggcgagggcgatgccacctacggcaagctgaccctgaagttcatctgcaccaccggcaagctgcccgtgccctggcccaccctcgtgaccaccctgacgtacggcgtgcagtgcttacatacaagcacatgaggatcacccatgtgc

SEQ ID NO: 19278 - DNA, 308 bp, synthetic construct
  source 1..308: mol_type = other DNA
gtaggggatgggcaccacccgttttagagctagaaatagcaagttaaaataaggctagtccgttatcaacttgaaaaagtggcaccgagtcggtgctggtgcccatcctggtcgagctggacggcgacgtaaacggccacaagttcagcgtgtccggcgagggcgagggcgatgccacctacggcaagctgaccctgaagttcatctgcaccaccggcaagctgcccgtgccctggcccaccctcgtgaccaccctgacgtacggcgtgcagtgcttacatacaagcacatgaggatcacccatgtgc

SEQ ID NO: 19279 - DNA, 303 bp, synthetic construct
  source 1..303: mol_type = other DNA
cgcccttgctcaccagttttagagctagaaatagcaagttaaaataaggctagtccgttatcaacttgaaaaagtggcaccgagtcggtgctggtgcccatcctggtcgagctggacggcgacgtaaacggccacaagttcagcgtgtccggcgagggcgagggcgatgccacctacggcaagctgaccctgaagttcatctgcaccaccggcaagctgcccgtgccctggcccaccctcgtgaccaccctgacgtacggcgtgcagtgcttacatacaagcacatgaggatcacccatgtgc

SEQ ID NO: 19280 - DNA, 308 bp, synthetic construct
  source 1..308: mol_type = other DNA
ctcctcgcccttgctcaccagttttagagctagaaatagcaagttaaaataaggctagtccgttatcaacttgaaaaagtggcaccgagtcggtgctggtgcccatcctggtcgagctggacggcgacgtaaacggccacaagttcagcgtgtccggcgagggcgagggcgatgccacctacggcaagctgaccctgaagttcatctgcaccaccggcaagctgcccgtgccctggcccaccctcgtgaccaccctgacgtacggcgtgcagtgcttacatacaagcacatgaggatcacccatgtgc

SEQ ID NO: 19281 - DNA, 283 bp, synthetic construct
  source 1..283: mol_type = other DNA
cgcggttctatctagttacgcgttaaaccaactagaaatggtgagcaagggcgaggagctgttcaccggggtggtgcccatcctggtcgagctggacggcgacgtaaacggccacaagttcagcgtgtccggcgagggcgagggcgatgccacctacggcaagctgaccctgaagttcatctgcaccaccggcaagctgcccgtgccctggcccaccctcgtgaccaccctgacgtacggcgtgcagtgcttacatacaagcacatgaggatcacccatgtgc

SEQ ID NO: 19282 - DNA, 322 bp, synthetic construct
  source 1..322: mol_type = other DNA
gttttagagctagaaatagcaagttaaaataaggctagtccgttatcaacttgaaaaagtggcaccgagtcggtgcatggtgagcaagggcgaggagctgttcaccggggtggtgcccatcctggtcgagctggacggcgacgtaaacggccacaagttcagcgtgtccggcgagggcgagggcgatgccacctacggcaagctgaccctgaagttcatctgcaccaccggcaagctgcccgtgccctggcccaccctcgtgaccaccctgacgtacggcgtgcagtgcttacatacaagcacatgaggatcacccatgtgc

SEQ ID NO: 19283 - DNA, 337 bp, synthetic construct
  source 1..337: mol_type = other DNA
agctgttcaccgggggttttagagctagaaatagcaagttaaaataaggctagtccgttatcaacttgaaaaagtggcaccgagtcggtgcatggtgagcaagggcgaggagctgttcaccggggtggtgcccatcctggtcgagctggacggcgacgtaaacggccacaagttcagcgtgtccggcgagggcgagggcgatgccacctacggcaagctgaccctgaagttcatctgcaccaccggcaagctgcccgtgccctggcccaccctcgtgaccaccctgacgtacggcgtgcagtgcttacatacaagcacatgaggatcacccatgtgc

SEQ ID NO: 19284 - DNA, 342 bp, synthetic construct
  source 1..342: mol_type = other DNA
cgaggagctgttcaccgggggttttagagctagaaatagcaagttaaaataaggctagtccgttatcaacttgaaaaagtggcaccgagtcggtgcatggtgagcaagggcgaggagctgttcaccggggtggtgcccatcctggtcgagctggacggcgacgtaaacggccacaagttcagcgtgtccggcgagggcgagggcgatgccacctacggcaagctgaccctgaagttcatctgcaccaccggcaagctgcccgtgccctggcccaccctcgtgaccaccctgacgtacggcgtgcagtgcttacatacaagcacatgaggatcacccatgtgc

SEQ ID NO: 19285 - DNA, 337 bp, synthetic construct
  source 1..337: mol_type = other DNA
tggtgagcaagggcggttttagagctagaaatagcaagttaaaataaggctagtccgttatcaacttgaaaaagtggcaccgagtcggtgcatggtgagcaagggcgaggagctgttcaccggggtggtgcccatcctggtcgagctggacggcgacgtaaacggccacaagttcagcgtgtccggcgagggcgagggcgatgccacctacggcaagctgaccctgaagttcatctgcaccaccggcaagctgcccgtgccctggcccaccctcgtgaccaccctgacgtacggcgtgcagtgcttacatacaagcacatgaggatcacccatgtgc

SEQ ID NO: 19286 - DNA, 342 bp, synthetic construct
  source 1..342: mol_type = other DNA
caccatggtgagcaagggcggttttagagctagaaatagcaagttaaaataaggctagtccgttatcaacttgaaaaagtggcaccgagtcggtgcatggtgagcaagggcgaggagctgttcaccggggtggtgcccatcctggtcgagctggacggcgacgtaaacggccacaagttcagcgtgtccggcgagggcgagggcgatgccacctacggcaagctgaccctgaagttcatctgcaccaccggcaagctgcccgtgccctggcccaccctcgtgaccaccctgacgtacggcgtgcagtgcttacatacaagcacatgaggatcacccatgtgc

SEQ ID NO: 19287 - DNA, 337 bp, synthetic construct
  source 1..337: mol_type = other DNA
ccaccgccgccaccagttttagagctagaaatagcaagttaaaataaggctagtccgttatcaacttgaaaaagtggcaccgagtcggtgcatggtgagcaagggcgaggagctgttcaccggggtggtgcccatcctggtcgagctggacggcgacgtaaacggccacaagttcagcgtgtccggcgagggcgagggcgatgccacctacggcaagctgaccctgaagttcatctgcaccaccggcaagctgcccgtgccctggcccaccctcgtgaccaccctgacgtacggcgtgcagtgcttacatacaagcacatgaggatcacccatgtgc

SEQ ID NO: 19288 - DNA, 342 bp, synthetic construct
  source 1..342: mol_type = other DNA
tcgagccaccgccgccaccagttttagagctagaaatagcaagttaaaataaggctagtccgttatcaacttgaaaaagtggcaccgagtcggtgcatggtgagcaagggcgaggagctgttcaccggggtggtgcccatcctggtcgagctggacggcgacgtaaacggccacaagttcagcgtgtccggcgagggcgagggcgatgccacctacggcaagctgaccctgaagttcatctgcaccaccggcaagctgcccgtgccctggcccaccctcgtgaccaccctgacgtacggcgtgcagtgcttacatacaagcacatgaggatcacccatgtgc

SEQ ID NO: 19289 - DNA, 337 bp, synthetic construct
  source 1..337: mol_type = other DNA
cacgccgtaggggatgttttagagctagaaatagcaagttaaaataaggctagtccgttatcaacttgaaaaagtggcaccgagtcggtgcatggtgagcaagggcgaggagctgttcaccggggtggtgcccatcctggtcgagctggacggcgacgtaaacggccacaagttcagcgtgtccggcgagggcgagggcgatgccacctacggcaagctgaccctgaagttcatctgcaccaccggcaagctgcccgtgccctggcccaccctcgtgaccaccctgacgtacggcgtgcagtgcttacatacaagcacatgaggatcacccatgtgc

SEQ ID NO: 19290 - DNA, 342 bp, synthetic construct
  source 1..342: mol_type = other DNA
cactgcacgccgtaggggatgttttagagctagaaatagcaagttaaaataaggctagtccgttatcaacttgaaaaagtggcaccgagtcggtgcatggtgagcaagggcgaggagctgttcaccggggtggtgcccatcctggtcgagctggacggcgacgtaaacggccacaagttcagcgtgtccggcgagggcgagggcgatgccacctacggcaagctgaccctgaagttcatctgcaccaccggcaagctgcccgtgccctggcccaccctcgtgaccaccctgacgtacggcgtgcagtgcttacatacaagcacatgaggatcacccatgtgc

SEQ ID NO: 19291 - DNA, 337 bp, synthetic construct
  source 1..337: mol_type = other DNA
ggatgggcaccacccgttttagagctagaaatagcaagttaaaataaggctagtccgttatcaacttgaaaaagtggcaccgagtcggtgcatggtgagcaagggcgaggagctgttcaccggggtggtgcccatcctggtcgagctggacggcgacgtaaacggccacaagttcagcgtgtccggcgagggcgagggcgatgccacctacggcaagctgaccctgaagttcatctgcaccaccggcaagctgcccgtgccctggcccaccctcgtgaccaccctgacgtacggcgtgcagtgcttacatacaagcacatgaggatcacccatgtgc

SEQ ID NO: 19292 - DNA, 342 bp, synthetic construct
  source 1..342: mol_type = other DNA
gtaggggatgggcaccacccgttttagagctagaaatagcaagttaaaataaggctagtccgttatcaacttgaaaaagtggcaccgagtcggtgcatggtgagcaagggcgaggagctgttcaccggggtggtgcccatcctggtcgagctggacggcgacgtaaacggccacaagttcagcgtgtccggcgagggcgagggcgatgccacctacggcaagctgaccctgaagttcatctgcaccaccggcaagctgcccgtgccctggcccaccctcgtgaccaccctgacgtacggcgtgcagtgcttacatacaagcacatgaggatcacccatgtgc

SEQ ID NO: 19293 - DNA, 337 bp, synthetic construct
  source 1..337: mol_type = other DNA
cgcccttgctcaccagttttagagctagaaatagcaagttaaaataaggctagtccgttatcaacttgaaaaagtggcaccgagtcggtgcatggtgagcaagggcgaggagctgttcaccggggtggtgcccatcctggtcgagctggacggcgacgtaaacggccacaagttcagcgtgtccggcgagggcgagggcgatgccacctacggcaagctgaccctgaagttcatctgcaccaccggcaagctgcccgtgccctggcccaccctcgtgaccaccctgacgtacggcgtgcagtgcttacatacaagcacatgaggatcacccatgtgc

SEQ ID NO: 19294 - DNA, 342 bp, synthetic construct
  source 1..342: mol_type = other DNA
ctcctcgcccttgctcaccagttttagagctagaaatagcaagttaaaataaggctagtccgttatcaacttgaaaaagtggcaccgagtcggtgcatggtgagcaagggcgaggagctgttcaccggggtggtgcccatcctggtcgagctggacggcgacgtaaacggccacaagttcagcgtgtccggcgagggcgagggcgatgccacctacggcaagctgaccctgaagttcatctgcaccaccggcaagctgcccgtgccctggcccaccctcgtgaccaccctgacgtacggcgtgcagtgcttacatacaagcacatgaggatcacccatgtgc

SEQ ID NO: 19295 - DNA, 366 bp, synthetic construct
  source 1..366: mol_type = other DNA
cgcggttctatctagttacgcgttaaaccaactagaatggtgcccatcctggtcgagctggacggcgacgtaaacggccacaagttcagcgtgtccggcgagggcgagggcgatgccacctacggcaagctgaccctgaagttcatctgcaccaccggcaagctgcccgtgccctggcccaccctcgtgaccaccctgacgtacggcgtgcagtgcttacatacaactaacatagggagcacatgaggatcacccatgtgcgactcccacagtcactggggagtcttccctctctctctctctctctctcgggagcacatgaggatcacccatgtgcgactcccacagtcactggggagtcttccc

SEQ ID NO: 19296 - DNA, 405 bp, synthetic construct
  source 1..405: mol_type = other DNA
gttttagagctagaaatagcaagttaaaataaggctagtccgttatcaacttgaaaaagtggcaccgagtcggtgctggtgcccatcctggtcgagctggacggcgacgtaaacggccacaagttcagcgtgtccggcgagggcgagggcgatgccacctacggcaagctgaccctgaagttcatctgcaccaccggcaagctgcccgtgccctggcccaccctcgtgaccaccctgacgtacggcgtgcagtgcttacatacaactaacatagggagcacatgaggatcacccatgtgcgactcccacagtcactggggagtcttccctctctctctctctctctctcgggagcacatgaggatcacccatgtgcgactcccacagtcactggggagtcttccc

SEQ ID NO: 19297 - DNA, 420 bp, synthetic construct
  source 1..420: mol_type = other DNA
agctgttcaccgggggttttagagctagaaatagcaagttaaaataaggctagtccgttatcaacttgaaaaagtggcaccgagtcggtgctggtgcccatcctggtcgagctggacggcgacgtaaacggccacaagttcagcgtgtccggcgagggcgagggcgatgccacctacggcaagctgaccctgaagttcatctgcaccaccggcaagctgcccgtgccctggcccaccctcgtgaccaccctgacgtacggcgtgcagtgcttacatacaactaacatagggagcacatgaggatcacccatgtgcgactcccacagtcactggggagtcttccctctctctctctctctctctcgggagcacatgaggatcacccatgtgcgactcccacagtcactggggagtcttccc

SEQ ID NO: 19298 - DNA, 425 bp, synthetic construct
  source 1..425: mol_type = other DNA
cgaggagctgttcaccgggggttttagagctagaaatagcaagttaaaataaggctagtccgttatcaacttgaaaaagtggcaccgagtcggtgctggtgcccatcctggtcgagctggacggcgacgtaaacggccacaagttcagcgtgtccggcgagggcgagggcgatgccacctacggcaagctgaccctgaagttcatctgcaccaccggcaagctgcccgtgccctggcccaccctcgtgaccaccctgacgtacggcgtgcagtgcttacatacaactaacatagggagcacatgaggatcacccatgtgcgactcccacagtcactggggagtcttccctctctctctctctctctctcgggagcacatgaggatcacccatgtgcgactcccacagtcactggggagtcttccc

SEQ ID NO: 19299 - DNA, 420 bp, synthetic construct
  source 1..420: mol_type = other DNA
tggtgagcaagggcggttttagagctagaaatagcaagttaaaataaggctagtccgttatcaacttgaaaaagtggcaccgagtcggtgctggtgcccatcctggtcgagctggacggcgacgtaaacggccacaagttcagcgtgtccggcgagggcgagggcgatgccacctacggcaagctgaccctgaagttcatctgcaccaccggcaagctgcccgtgccctggcccaccctcgtgaccaccctgacgtacggcgtgcagtgcttacatacaactaacatagggagcacatgaggatcacccatgtgcgactcccacagtcactggggagtcttccctctctctctctctctctctcgggagcacatgaggatcacccatgtgcgactcccacagtcactggggagtcttccc

SEQ ID NO: 19300 - DNA, 425 bp, synthetic construct
  source 1..425: mol_type = other DNA
caccatggtgagcaagggcggttttagagctagaaatagcaagttaaaataaggctagtccgttatcaacttgaaaaagtggcaccgagtcggtgctggtgcccatcctggtcgagctggacggcgacgtaaacggccacaagttcagcgtgtccggcgagggcgagggcgatgccacctacggcaagctgaccctgaagttcatctgcaccaccggcaagctgcccgtgccctggcccaccctcgtgaccaccctgacgtacggcgtgcagtgcttacatacaactaacatagggagcacatgaggatcacccatgtgcgactcccacagtcactggggagtcttccctctctctctctctctctctcgggagcacatgaggatcacccatgtgcgactcccacagtcactggggagtcttccc

SEQ ID NO: 19301 - DNA, 420 bp, synthetic construct
  source 1..420: mol_type = other DNA
ccaccgccgccaccagttttagagctagaaatagcaagttaaaataaggctagtccgttatcaacttgaaaaagtggcaccgagtcggtgctggtgcccatcctggtcgagctggacggcgacgtaaacggccacaagttcagcgtgtccggcgagggcgagggcgatgccacctacggcaagctgaccctgaagttcatctgcaccaccggcaagctgcccgtgccctggcccaccctcgtgaccaccctgacgtacggcgtgcagtgcttacatacaactaacatagggagcacatgaggatcacccatgtgcgactcccacagtcactggggagtcttccctctctctctctctctctctcgggagcacatgaggatcacccatgtgcgactcccacagtcactggggagtcttccc

SEQ ID NO: 19302 - DNA, 425 bp, synthetic construct
  source 1..425: mol_type = other DNA
tcgagccaccgccgccaccagttttagagctagaaatagcaagttaaaataaggctagtccgttatcaacttgaaaaagtggcaccgagtcggtgctggtgcccatcctggtcgagctggacggcgacgtaaacggccacaagttcagcgtgtccggcgagggcgagggcgatgccacctacggcaagctgaccctgaagttcatctgcaccaccggcaagctgcccgtgccctggcccaccctcgtgaccaccctgacgtacggcgtgcagtgcttacatacaactaacatagggagcacatgaggatcacccatgtgcgactcccacagtcactggggagtcttccctctctctctctctctctctcgggagcacatgaggatcacccatgtgcgactcccacagtcactggggagtcttccc

SEQ ID NO: 19303 - DNA, 420 bp, synthetic construct
  source 1..420: mol_type = other DNA
cacgccgtaggggatgttttagagctagaaatagcaagttaaaataaggctagtccgttatcaacttgaaaaagtggcaccgagtcggtgctggtgcccatcctggtcgagctggacggcgacgtaaacggccacaagttcagcgtgtccggcgagggcgagggcgatgccacctacggcaagctgaccctgaagttcatctgcaccaccggcaagctgcccgtgccctggcccaccctcgtgaccaccctgacgtacggcgtgcagtgcttacatacaactaacatagggagcacatgaggatcacccatgtgcgactcccacagtcactggggagtcttccctctctctctctctctctctcgggagcacatgaggatcacccatgtgcgactcccacagtcactggggagtcttccc

SEQ ID NO: 19304 - DNA, 425 bp, synthetic construct
  source 1..425: mol_type = other DNA
cactgcacgccgtaggggatgttttagagctagaaatagcaagttaaaataaggctagtccgttatcaacttgaaaaagtggcaccgagtcggtgctggtgcccatcctggtcgagctggacggcgacgtaaacggccacaagttcagcgtgtccggcgagggcgagggcgatgccacctacggcaagctgaccctgaagttcatctgcaccaccggcaagctgcccgtgccctggcccaccctcgtgaccaccctgacgtacggcgtgcagtgcttacatacaactaacatagggagcacatgaggatcacccatgtgcgactcccacagtcactggggagtcttccctctctctctctctctctctcgggagcacatgaggatcacccatgtgcgactcccacagtcactggggagtcttccc

SEQ ID NO: 19305 - DNA, 420 bp, synthetic construct
  source 1..420: mol_type = other DNA
ggatgggcaccacccgttttagagctagaaatagcaagttaaaataaggctagtccgttatcaacttgaaaaagtggcaccgagtcggtgctggtgcccatcctggtcgagctggacggcgacgtaaacggccacaagttcagcgtgtccggcgagggcgagggcgatgccacctacggcaagctgaccctgaagttcatctgcaccaccggcaagctgcccgtgccctggcccaccctcgtgaccaccctgacgtacggcgtgcagtgcttacatacaactaacatagggagcacatgaggatcacccatgtgcgactcccacagtcactggggagtcttccctctctctctctctctctctcgggagcacatgaggatcacccatgtgcgactcccacagtcactggggagtcttccc

SEQ ID NO: 19306 - DNA, 425 bp, synthetic construct
  source 1..425: mol_type = other DNA
gtaggggatgggcaccacccgttttagagctagaaatagcaagttaaaataaggctagtccgttatcaacttgaaaaagtggcaccgagtcggtgctggtgcccatcctggtcgagctggacggcgacgtaaacggccacaagttcagcgtgtccggcgagggcgagggcgatgccacctacggcaagctgaccctgaagttcatctgcaccaccggcaagctgcccgtgccctggcccaccctcgtgaccaccctgacgtacggcgtgcagtgcttacatacaactaacatagggagcacatgaggatcacccatgtgcgactcccacagtcactggggagtcttccctctctctctctctctctctcgggagcacatgaggatcacccatgtgcgactcccacagtcactggggagtcttccc

SEQ ID NO: 19307 - DNA, 420 bp, synthetic construct
  source 1..420: mol_type = other DNA
cgcccttgctcaccagttttagagctagaaatagcaagttaaaataaggctagtccgttatcaacttgaaaaagtggcaccgagtcggtgctggtgcccatcctggtcgagctggacggcgacgtaaacggccacaagttcagcgtgtccggcgagggcgagggcgatgccacctacggcaagctgaccctgaagttcatctgcaccaccggcaagctgcccgtgccctggcccaccctcgtgaccaccctgacgtacggcgtgcagtgcttacatacaactaacatagggagcacatgaggatcacccatgtgcgactcccacagtcactggggagtcttccctctctctctctctctctctcgggagcacatgaggatcacccatgtgcgactcccacagtcactggggagtcttccc

SEQ ID NO: 19308 - DNA, 425 bp, synthetic construct
  source 1..425: mol_type = other DNA
ctcctcgcccttgctcaccagttttagagctagaaatagcaagttaaaataaggctagtccgttatcaacttgaaaaagtggcaccgagtcggtgctggtgcccatcctggtcgagctggacggcgacgtaaacggccacaagttcagcgtgtccggcgagggcgagggcgatgccacctacggcaagctgaccctgaagttcatctgcaccaccggcaagctgcccgtgccctggcccaccctcgtgaccaccctgacgtacggcgtgcagtgcttacatacaactaacatagggagcacatgaggatcacccatgtgcgactcccacagtcactggggagtcttccctctctctctctctctctctcgggagcacatgaggatcacccatgtgcgactcccacagtcactggggagtcttccc

SEQ ID NO: 19309 - DNA, 400 bp, synthetic construct
  source 1..400: mol_type = other DNA
cgcggttctatctagttacgcgttaaaccaactagaaatggtgagcaagggcgaggagctgttcaccggggtggtgcccatcctggtcgagctggacggcgacgtaaacggccacaagttcagcgtgtccggcgagggcgagggcgatgccacctacggcaagctgaccctgaagttcatctgcaccaccggcaagctgcccgtgccctggcccaccctcgtgaccaccctgacgtacggcgtgcagtgcttacatacaactaacatagggagcacatgaggatcacccatgtgcgactcccacagtcactggggagtcttccctctctctctctctctctctcgggagcacatgaggatcacccatgtgcgactcccacagtcactggggagtcttccc

SEQ ID NO: 19310 - DNA, 439 bp, synthetic construct
  source 1..439: mol_type = other DNA
gttttagagctagaaatagcaagttaaaataaggctagtccgttatcaacttgaaaaagtggcaccgagtcggtgcatggtgagcaagggcgaggagctgttcaccggggtggtgcccatcctggtcgagctggacggcgacgtaaacggccacaagttcagcgtgtccggcgagggcgagggcgatgccacctacggcaagctgaccctgaagttcatctgcaccaccggcaagctgcccgtgccctggcccaccctcgtgaccaccctgacgtacggcgtgcagtgcttacatacaactaacatagggagcacatgaggatcacccatgtgcgactcccacagtcactggggagtcttccctctctctctctctctctctcgggagcacatgaggatcacccatgtgcgactcccacagtcactggggagtcttccc

SEQ ID NO: 19311 - DNA, 454 bp, synthetic construct
  source 1..454: mol_type = other DNA
agctgttcaccgggggttttagagctagaaatagcaagttaaaataaggctagtccgttatcaacttgaaaaagtggcaccgagtcggtgcatggtgagcaagggcgaggagctgttcaccggggtggtgcccatcctggtcgagctggacggcgacgtaaacggccacaagttcagcgtgtccggcgagggcgagggcgatgccacctacggcaagctgaccctgaagttcatctgcaccaccggcaagctgcccgtgccctggcccaccctcgtgaccaccctgacgtacggcgtgcagtgcttacatacaactaacatagggagcacatgaggatcacccatgtgcgactcccacagtcactggggagtcttccctctctctctctctctctctcgggagcacatgaggatcacccatgtgcgactcccacagtcactggggagtcttccc

SEQ ID NO: 19312 - DNA, 459 bp, synthetic construct
  source 1..459: mol_type = other DNA
cgaggagctgttcaccgggggttttagagctagaaatagcaagttaaaataaggctagtccgttatcaacttgaaaaagtggcaccgagtcggtgcatggtgagcaagggcgaggagctgttcaccggggtggtgcccatcctggtcgagctggacggcgacgtaaacggccacaagttcagcgtgtccggcgagggcgagggcgatgccacctacggcaagctgaccctgaagttcatctgcaccaccggcaagctgcccgtgccctggcccaccctcgtgaccaccctgacgtacggcgtgcagtgcttacatacaactaacatagggagcacatgaggatcacccatgtgcgactcccacagtcactggggagtcttccctctctctctctctctctctcgggagcacatgaggatcacccatgtgcgactcccacagtcactggggagtcttccc

SEQ ID NO: 19313 - DNA, 454 bp, synthetic construct
  source 1..454: mol_type = other DNA
tggtgagcaagggcggttttagagctagaaatagcaagttaaaataaggctagtccgttatcaacttgaaaaagtggcaccgagtcggtgcatggtgagcaagggcgaggagctgttcaccggggtggtgcccatcctggtcgagctggacggcgacgtaaacggccacaagttcagcgtgtccggcgagggcgagggcgatgccacctacggcaagctgaccctgaagttcatctgcaccaccggcaagctgcccgtgccctggcccaccctcgtgaccaccctgacgtacggcgtgcagtgcttacatacaactaacatagggagcacatgaggatcacccatgtgcgactcccacagtcactggggagtcttccctctctctctctctctctctcgggagcacatgaggatcacccatgtgcgactcccacagtcactggggagtcttccc

SEQ ID NO: 19314 - DNA, 459 bp, synthetic construct
  source 1..459: mol_type = other DNA
caccatggtgagcaagggcggttttagagctagaaatagcaagttaaaataaggctagtccgttatcaacttgaaaaagtggcaccgagtcggtgcatggtgagcaagggcgaggagctgttcaccggggtggtgcccatcctggtcgagctggacggcgacgtaaacggccacaagttcagcgtgtccggcgagggcgagggcgatgccacctacggcaagctgaccctgaagttcatctgcaccaccggcaagctgcccgtgccctggcccaccctcgtgaccaccctgacgtacggcgtgcagtgcttacatacaactaacatagggagcacatgaggatcacccatgtgcgactcccacagtcactggggagtcttccctctctctctctctctctctcgggagcacatgaggatcacccatgtgcgactcccacagtcactggggagtcttccc

SEQ ID NO: 19315 - DNA, 454 bp, synthetic construct
  source 1..454: mol_type = other DNA
ccaccgccgccaccagttttagagctagaaatagcaagttaaaataaggctagtccgttatcaacttgaaaaagtggcaccgagtcggtgcatggtgagcaagggcgaggagctgttcaccggggtggtgcccatcctggtcgagctggacggcgacgtaaacggccacaagttcagcgtgtccggcgagggcgagggcgatgccacctacggcaagctgaccctgaagttcatctgcaccaccggcaagctgcccgtgccctggcccaccctcgtgaccaccctgacgtacggcgtgcagtgcttacatacaactaacatagggagcacatgaggatcacccatgtgcgactcccacagtcactggggagtcttccctctctctctctctctctctcgggagcacatgaggatcacccatgtgcgactcccacagtcactggggagtcttccc

SEQ ID NO: 19316 - DNA, 459 bp, synthetic construct
  source 1..459: mol_type = other DNA
tcgagccaccgccgccaccagttttagagctagaaatagcaagttaaaataaggctagtccgttatcaacttgaaaaagtggcaccgagtcggtgcatggtgagcaagggcgaggagctgttcaccggggtggtgcccatcctggtcgagctggacggcgacgtaaacggccacaagttcagcgtgtccggcgagggcgagggcgatgccacctacggcaagctgaccctgaagttcatctgcaccaccggcaagctgcccgtgccctggcccaccctcgtgaccaccctgacgtacggcgtgcagtgcttacatacaactaacatagggagcacatgaggatcacccatgtgcgactcccacagtcactggggagtcttccctctctctctctctctctctcgggagcacatgaggatcacccatgtgcgactcccacagtcactggggagtcttccc

SEQ ID NO: 19317 - DNA, 454 bp, synthetic construct
  source 1..454: mol_type = other DNA
cacgccgtaggggatgttttagagctagaaatagcaagttaaaataaggctagtccgttatcaacttgaaaaagtggcaccgagtcggtgcatggtgagcaagggcgaggagctgttcaccggggtggtgcccatcctggtcgagctggacggcgacgtaaacggccacaagttcagcgtgtccggcgagggcgagggcgatgccacctacggcaagctgaccctgaagttcatctgcaccaccggcaagctgcccgtgccctggcccaccctcgtgaccaccctgacgtacggcgtgcagtgcttacatacaactaacatagggagcacatgaggatcacccatgtgcgactcccacagtcactggggagtcttccctctctctctctctctctctcgggagcacatgaggatcacccatgtgcgactcccacagtcactggggagtcttccc

SEQ ID NO: 19318 - DNA, 459 bp, synthetic construct
  source 1..459: mol_type = other DNA
cactgcacgccgtaggggatgttttagagctagaaatagcaagttaaaataaggctagtccgttatcaacttgaaaaagtggcaccgagtcggtgcatggtgagcaagggcgaggagctgttcaccggggtggtgcccatcctggtcgagctggacggcgacgtaaacggccacaagttcagcgtgtccggcgagggcgagggcgatgccacctacggcaagctgaccctgaagttcatctgcaccaccggcaagctgcccgtgccctggcccaccctcgtgaccaccctgacgtacggcgtgcagtgcttacatacaactaacatagggagcacatgaggatcacccatgtgcgactcccacagtcactggggagtcttccctctctctctctctctctctcgggagcacatgaggatcacccatgtgcgactcccacagtcactggggagtcttccc

SEQ ID NO: 19319 - DNA, 454 bp, synthetic construct
  source 1..454: mol_type = other DNA
ggatgggcaccacccgttttagagctagaaatagcaagttaaaataaggctagtccgttatcaacttgaaaaagtggcaccgagtcggtgcatggtgagcaagggcgaggagctgttcaccggggtggtgcccatcctggtcgagctggacggcgacgtaaacggccacaagttcagcgtgtccggcgagggcgagggcgatgccacctacggcaagctgaccctgaagttcatctgcaccaccggcaagctgcccgtgccctggcccaccctcgtgaccaccctgacgtacggcgtgcagtgcttacatacaactaacatagggagcacatgaggatcacccatgtgcgactcccacagtcactggggagtcttccctctctctctctctctctctcgggagcacatgaggatcacccatgtgcgactcccacagtcactggggagtcttccc

SEQ ID NO: 19320 - DNA, 459 bp, synthetic construct
  source 1..459: mol_type = other DNA
gtaggggatgggcaccacccgttttagagctagaaatagcaagttaaaataaggctagtccgttatcaacttgaaaaagtggcaccgagtcggtgcatggtgagcaagggcgaggagctgttcaccggggtggtgcccatcctggtcgagctggacggcgacgtaaacggccacaagttcagcgtgtccggcgagggcgagggcgatgccacctacggcaagctgaccctgaagttcatctgcaccaccggcaagctgcccgtgccctggcccaccctcgtgaccaccctgacgtacggcgtgcagtgcttacatacaactaacatagggagcacatgaggatcacccatgtgcgactcccacagtcactggggagtcttccctctctctctctctctctctcgggagcacatgaggatcacccatgtgcgactcccacagtcactggggagtcttccc

SEQ ID NO: 19321 - DNA, 454 bp, synthetic construct
  source 1..454: mol_type = other DNA
cgcccttgctcaccagttttagagctagaaatagcaagttaaaataaggctagtccgttatcaacttgaaaaagtggcaccgagtcggtgcatggtgagcaagggcgaggagctgttcaccggggtggtgcccatcctggtcgagctggacggcgacgtaaacggccacaagttcagcgtgtccggcgagggcgagggcgatgccacctacggcaagctgaccctgaagttcatctgcaccaccggcaagctgcccgtgccctggcccaccctcgtgaccaccctgacgtacggcgtgcagtgcttacatacaactaacatagggagcacatgaggatcacccatgtgcgactcccacagtcactggggagtcttccctctctctctctctctctctcgggagcacatgaggatcacccatgtgcgactcccacagtcactggggagtcttccc

SEQ ID NO: 19322 - DNA, 459 bp, synthetic construct
  source 1..459: mol_type = other DNA
ctcctcgcccttgctcaccagttttagagctagaaatagcaagttaaaataaggctagtccgttatcaacttgaaaaagtggcaccgagtcggtgcatggtgagcaagggcgaggagctgttcaccggggtggtgcccatcctggtcgagctggacggcgacgtaaacggccacaagttcagcgtgtccggcgagggcgagggcgatgccacctacggcaagctgaccctgaagttcatctgcaccaccggcaagctgcccgtgccctggcccaccctcgtgaccaccctgacgtacggcgtgcagtgcttacatacaactaacatagggagcacatgaggatcacccatgtgcgactcccacagtcactggggagtcttccctctctctctctctctctctcgggagcacatgaggatcacccatgtgcgactcccacagtcactggggagtcttccc

SEQ ID NO: 19323 - DNA, 284 bp, synthetic construct
  source 1..284: mol_type = other DNA
cgcggttctatctagttacgcgttaaaccaactagaatggtgcccatcctggtcgagctggacggcgacgtaaacggccacaagttcagcgtgtccggcgagggcgagggcgatgccacctacggcaagctgaccctgaagttcatctgcaccaccggcaagctgcccgtgccctggcccaccctcgtgaccaccctgacgtacggcgtgcagtgcttacatacaactaacatagggtcaggagcccccccctgaacccaggataaccctcaaagtcggggggc

SEQ ID NO: 19324 - DNA, 323 bp, synthetic construct
  source 1..323: mol_type = other DNA
gttttagagctagaaatagcaagttaaaataaggctagtccgttatcaacttgaaaaagtggcaccgagtcggtgctggtgcccatcctggtcgagctggacggcgacgtaaacggccacaagttcagcgtgtccggcgagggcgagggcgatgccacctacggcaagctgaccctgaagttcatctgcaccaccggcaagctgcccgtgccctggcccaccctcgtgaccaccctgacgtacggcgtgcagtgcttacatacaactaacatagggtcaggagcccccccctgaacccaggataaccctcaaagtcggggggc

SEQ ID NO: 19325 - DNA, 338 bp, synthetic construct
  source 1..338: mol_type = other DNA
agctgttcaccgggggttttagagctagaaatagcaagttaaaataaggctagtccgttatcaacttgaaaaagtggcaccgagtcggtgctggtgcccatcctggtcgagctggacggcgacgtaaacggccacaagttcagcgtgtccggcgagggcgagggcgatgccacctacggcaagctgaccctgaagttcatctgcaccaccggcaagctgcccgtgccctggcccaccctcgtgaccaccctgacgtacggcgtgcagtgcttacatacaactaacatagggtcaggagcccccccctgaacccaggataaccctcaaagtcggggggc

SEQ ID NO: 19326 - DNA, 343 bp, synthetic construct
  source 1..343: mol_type = other DNA
cgaggagctgttcaccgggggttttagagctagaaatagcaagttaaaataaggctagtccgttatcaacttgaaaaagtggcaccgagtcggtgctggtgcccatcctggtcgagctggacggcgacgtaaacggccacaagttcagcgtgtccggcgagggcgagggcgatgccacctacggcaagctgaccctgaagttcatctgcaccaccggcaagctgcccgtgccctggcccaccctcgtgaccaccctgacgtacggcgtgcagtgcttacatacaactaacatagggtcaggagcccccccctgaacccaggataaccctcaaagtcggggggc

SEQ ID NO: 19327 - DNA, 338 bp, synthetic construct
  source 1..338: mol_type = other DNA
tggtgagcaagggcggttttagagctagaaatagcaagttaaaataaggctagtccgttatcaacttgaaaaagtggcaccgagtcggtgctggtgcccatcctggtcgagctggacggcgacgtaaacggccacaagttcagcgtgtccggcgagggcgagggcgatgccacctacggcaagctgaccctgaagttcatctgcaccaccggcaagctgcccgtgccctggcccaccctcgtgaccaccctgacgtacggcgtgcagtgcttacatacaactaacatagggtcaggagcccccccctgaacccaggataaccctcaaagtcggggggc

SEQ ID NO: 19328 - DNA, 343 bp, synthetic construct
  source 1..343: mol_type = other DNA
caccatggtgagcaagggcggttttagagctagaaatagcaagttaaaataaggctagtccgttatcaacttgaaaaagtggcaccgagtcggtgctggtgcccatcctggtcgagctggacggcgacgtaaacggccacaagttcagcgtgtccggcgagggcgagggcgatgccacctacggcaagctgaccctgaagttcatctgcaccaccggcaagctgcccgtgccctggcccaccctcgtgaccaccctgacgtacggcgtgcagtgcttacatacaactaacatagggtcaggagcccccccctgaacccaggataaccctcaaagtcggggggc

SEQ ID NO: 19329 - DNA, 338 bp, synthetic construct
  source 1..338: mol_type = other DNA
ccaccgccgccaccagttttagagctagaaatagcaagttaaaataaggctagtccgttatcaacttgaaaaagtggcaccgagtcggtgctggtgcccatcctggtcgagctggacggcgacgtaaacggccacaagttcagcgtgtccggcgagggcgagggcgatgccacctacggcaagctgaccctgaagttcatctgcaccaccggcaagctgcccgtgccctggcccaccctcgtgaccaccctgacgtacggcgtgcagtgcttacatacaactaacatagggtcaggagcccccccctgaacccaggataaccctcaaagtcggggggc

SEQ ID NO: 19330 - DNA, 343 bp, synthetic construct
  source 1..343: mol_type = other DNA
tcgagccaccgccgccaccagttttagagctagaaatagcaagttaaaataaggctagtccgttatcaacttgaaaaagtggcaccgagtcggtgctggtgcccatcctggtcgagctggacggcgacgtaaacggccacaagttcagcgtgtccggcgagggcgagggcgatgccacctacggcaagctgaccctgaagttcatctgcaccaccggcaagctgcccgtgccctggcccaccctcgtgaccaccctgacgtacggcgtgcagtgcttacatacaactaacatagggtcaggagcccccccctgaacccaggataaccctcaaagtcggggggc

SEQ ID NO: 19331 - DNA, 338 bp, synthetic construct
  source 1..338: mol_type = other DNA
cacgccgtaggggatgttttagagctagaaatagcaagttaaaataaggctagtccgttatcaacttgaaaaagtggcaccgagtcggtgctggtgcccatcctggtcgagctggacggcgacgtaaacggccacaagttcagcgtgtccggcgagggcgagggcgatgccacctacggcaagctgaccctgaagttcatctgcaccaccggcaagctgcccgtgccctggcccaccctcgtgaccaccctgacgtacggcgtgcagtgcttacatacaactaacatagggtcaggagcccccccctgaacccaggataaccctcaaagtcggggggc

SEQ ID NO: 19332 - DNA, 343 bp, synthetic construct
  source 1..343: mol_type = other DNA
cactgcacgccgtaggggatgttttagagctagaaatagcaagttaaaataaggctagtccgttatcaacttgaaaaagtggcaccgagtcggtgctggtgcccatcctggtcgagctggacggcgacgtaaacggccacaagttcagcgtgtccggcgagggcgagggcgatgccacctacggcaagctgaccctgaagttcatctgcaccaccggcaagctgcccgtgccctggcccaccctcgtgaccaccctgacgtacggcgtgcagtgcttacatacaactaacatagggtcaggagcccccccctgaacccaggataaccctcaaagtcggggggc

SEQ ID NO: 19333 - DNA, 338 bp, synthetic construct
  source 1..338: mol_type = other DNA
ggatgggcaccacccgttttagagctagaaatagcaagttaaaataaggctagtccgttatcaacttgaaaaagtggcaccgagtcggtgctggtgcccatcctggtcgagctggacggcgacgtaaacggccacaagttcagcgtgtccggcgagggcgagggcgatgccacctacggcaagctgaccctgaagttcatctgcaccaccggcaagctgcccgtgccctggcccaccctcgtgaccaccctgacgtacggcgtgcagtgcttacatacaactaacatagggtcaggagcccccccctgaacccaggataaccctcaaagtcggggggc

SEQ ID NO: 19334 - DNA, 343 bp, synthetic construct
  source 1..343: mol_type = other DNA
gtaggggatgggcaccacccgttttagagctagaaatagcaagttaaaataaggctagtccgttatcaacttgaaaaagtggcaccgagtcggtgctggtgcccatcctggtcgagctggacggcgacgtaaacggccacaagttcagcgtgtccggcgagggcgagggcgatgccacctacggcaagctgaccctgaagttcatctgcaccaccggcaagctgcccgtgccctggcccaccctcgtgaccaccctgacgtacggcgtgcagtgcttacatacaactaacatagggtcaggagcccccccctgaacccaggataaccctcaaagtcggggggc

SEQ ID NO: 19335 - DNA, 338 bp, synthetic construct
  source 1..338: mol_type = other DNA
cgcccttgctcaccagttttagagctagaaatagcaagttaaaataaggctagtccgttatcaacttgaaaaagtggcaccgagtcggtgctggtgcccatcctggtcgagctggacggcgacgtaaacggccacaagttcagcgtgtccggcgagggcgagggcgatgccacctacggcaagctgaccctgaagttcatctgcaccaccggcaagctgcccgtgccctggcccaccctcgtgaccaccctgacgtacggcgtgcagtgcttacatacaactaacatagggtcaggagcccccccctgaacccaggataaccctcaaagtcggggggc

SEQ ID NO: 19336 - DNA, 343 bp, synthetic construct
  source 1..343: mol_type = other DNA
ctcctcgcccttgctcaccagttttagagctagaaatagcaagttaaaataaggctagtccgttatcaacttgaaaaagtggcaccgagtcggtgctggtgcccatcctggtcgagctggacggcgacgtaaacggccacaagttcagcgtgtccggcgagggcgagggcgatgccacctacggcaagctgaccctgaagttcatctgcaccaccggcaagctgcccgtgccctggcccaccctcgtgaccaccctgacgtacggcgtgcagtgcttacatacaactaacatagggtcaggagcccccccctgaacccaggataaccctcaaagtcggggggc

SEQ ID NO: 19337 - DNA, 318 bp, synthetic construct
  source 1..318: mol_type = other DNA
cgcggttctatctagttacgcgttaaaccaactagaaatggtgagcaagggcgaggagctgttcaccggggtggtgcccatcctggtcgagctggacggcgacgtaaacggccacaagttcagcgtgtccggcgagggcgagggcgatgccacctacggcaagctgaccctgaagttcatctgcaccaccggcaagctgcccgtgccctggcccaccctcgtgaccaccctgacgtacggcgtgcagtgcttacatacaactaacatagggtcaggagcccccccctgaacccaggataaccctcaaagtcggggggc

SEQ ID NO: 19338 - DNA, 357 bp, synthetic construct
  source 1..357: mol_type = other DNA
gttttagagctagaaatagcaagttaaaataaggctagtccgttatcaacttgaaaaagtggcaccgagtcggtgcatggtgagcaagggcgaggagctgttcaccggggtggtgcccatcctggtcgagctggacggcgacgtaaacggccacaagttcagcgtgtccggcgagggcgagggcgatgccacctacggcaagctgaccctgaagttcatctgcaccaccggcaagctgcccgtgccctggcccaccctcgtgaccaccctgacgtacggcgtgcagtgcttacatacaactaacatagggtcaggagcccccccctgaacccaggataaccctcaaagtcggggggc

SEQ ID NO: 19339 - DNA, 372 bp, synthetic construct
  source 1..372: mol_type = other DNA
agctgttcaccgggggttttagagctagaaatagcaagttaaaataaggctagtccgttatcaacttgaaaaagtggcaccgagtcggtgcatggtgagcaagggcgaggagctgttcaccggggtggtgcccatcctggtcgagctggacggcgacgtaaacggccacaagttcagcgtgtccggcgagggcgagggcgatgccacctacggcaagctgaccctgaagttcatctgcaccaccggcaagctgcccgtgccctggcccaccctcgtgaccaccctgacgtacggcgtgcagtgcttacatacaactaacatagggtcaggagcccccccctgaacccaggataaccctcaaagtcggggggc

SEQ ID NO: 19340 - DNA, 377 bp, synthetic construct
  source 1..377: mol_type = other DNA
cgaggagctgttcaccgggggttttagagctagaaatagcaagttaaaataaggctagtccgttatcaacttgaaaaagtggcaccgagtcggtgcatggtgagcaagggcgaggagctgttcaccggggtggtgcccatcctggtcgagctggacggcgacgtaaacggccacaagttcagcgtgtccggcgagggcgagggcgatgccacctacggcaagctgaccctgaagttcatctgcaccaccggcaagctgcccgtgccctggcccaccctcgtgaccaccctgacgtacggcgtgcagtgcttacatacaactaacatagggtcaggagcccccccctgaacccaggataaccctcaaagtcggggggc

SEQ ID NO: 19341 - DNA, 372 bp, synthetic construct
  source 1..372: mol_type = other DNA
tggtgagcaagggcggttttagagctagaaatagcaagttaaaataaggctagtccgttatcaacttgaaaaagtggcaccgagtcggtgcatggtgagcaagggcgaggagctgttcaccggggtggtgcccatcctggtcgagctggacggcgacgtaaacggccacaagttcagcgtgtccggcgagggcgagggcgatgccacctacggcaagctgaccctgaagttcatctgcaccaccggcaagctgcccgtgccctggcccaccctcgtgaccaccctgacgtacggcgtgcagtgcttacatacaactaacatagggtcaggagcccccccctgaacccaggataaccctcaaagtcggggggc

SEQ ID NO: 19342 - DNA, 377 bp, synthetic construct
  source 1..377: mol_type = other DNA
caccatggtgagcaagggcggttttagagctagaaatagcaagttaaaataaggctagtccgttatcaacttgaaaaagtggcaccgagtcggtgcatggtgagcaagggcgaggagctgttcaccggggtggtgcccatcctggtcgagctggacggcgacgtaaacggccacaagttcagcgtgtccggcgagggcgagggcgatgccacctacggcaagctgaccctgaagttcatctgcaccaccggcaagctgcccgtgccctggcccaccctcgtgaccaccctgacgtacggcgtgcagtgcttacatacaactaacatagggtcaggagcccccccctgaacccaggataaccctcaaagtcggggggc

SEQ ID NO: 19343 - DNA, 372 bp, synthetic construct
  source 1..372: mol_type = other DNA
ccaccgccgccaccagttttagagctagaaatagcaagttaaaataaggctagtccgttatcaacttgaaaaagtggcaccgagtcggtgcatggtgagcaagggcgaggagctgttcaccggggtggtgcccatcctggtcgagctggacggcgacgtaaacggccacaagttcagcgtgtccggcgagggcgagggcgatgccacctacggcaagctgaccctgaagttcatctgcaccaccggcaagctgcccgtgccctggcccaccctcgtgaccaccctgacgtacggcgtgcagtgcttacatacaactaacatagggtcaggagcccccccctgaacccaggataaccctcaaagtcggggggc

SEQ ID NO: 19344 - DNA, 377 bp, synthetic construct
  source 1..377: mol_type = other DNA
tcgagccaccgccgccaccagttttagagctagaaatagcaagttaaaataaggctagtccgttatcaacttgaaaaagtggcaccgagtcggtgcatggtgagcaagggcgaggagctgttcaccggggtggtgcccatcctggtcgagctggacggcgacgtaaacggccacaagttcagcgtgtccggcgagggcgagggcgatgccacctacggcaagctgaccctgaagttcatctgcaccaccggcaagctgcccgtgccctggcccaccctcgtgaccaccctgacgtacggcgtgcagtgcttacatacaactaacatagggtcaggagcccccccctgaacccaggataaccctcaaagtcggggggc

SEQ ID NO: 19345 - DNA, 372 bp, synthetic construct
  source 1..372: mol_type = other DNA
cacgccgtaggggatgttttagagctagaaatagcaagttaaaataaggctagtccgttatcaacttgaaaaagtggcaccgagtcggtgcatggtgagcaagggcgaggagctgttcaccggggtggtgcccatcctggtcgagctggacggcgacgtaaacggccacaagttcagcgtgtccggcgagggcgagggcgatgccacctacggcaagctgaccctgaagttcatctgcaccaccggcaagctgcccgtgccctggcccaccctcgtgaccaccctgacgtacggcgtgcagtgcttacatacaactaacatagggtcaggagcccccccctgaacccaggataaccctcaaagtcggggggc

SEQ ID NO: 19346 - DNA, 377 bp, synthetic construct
  source 1..377: mol_type = other DNA
cactgcacgccgtaggggatgttttagagctagaaatagcaagttaaaataaggctagtccgttatcaacttgaaaaagtggcaccgagtcggtgcatggtgagcaagggcgaggagctgttcaccggggtggtgcccatcctggtcgagctggacggcgacgtaaacggccacaagttcagcgtgtccggcgagggcgagggcgatgccacctacggcaagctgaccctgaagttcatctgcaccaccggcaagctgcccgtgccctggcccaccctcgtgaccaccctgacgtacggcgtgcagtgcttacatacaactaacatagggtcaggagcccccccctgaacccaggataaccctcaaagtcggggggc

SEQ ID NO: 19347 - DNA, 372 bp, synthetic construct
  source 1..372: mol_type = other DNA
ggatgggcaccacccgttttagagctagaaatagcaagttaaaataaggctagtccgttatcaacttgaaaaagtggcaccgagtcggtgcatggtgagcaagggcgaggagctgttcaccggggtggtgcccatcctggtcgagctggacggcgacgtaaacggccacaagttcagcgtgtccggcgagggcgagggcgatgccacctacggcaagctgaccctgaagttcatctgcaccaccggcaagctgcccgtgccctggcccaccctcgtgaccaccctgacgtacggcgtgcagtgcttacatacaactaacatagggtcaggagcccccccctgaacccaggataaccctcaaagtcggggggc

SEQ ID NO: 19348 - DNA, 377 bp, synthetic construct
  source 1..377: mol_type = other DNA
gtaggggatgggcaccacccgttttagagctagaaatagcaagttaaaataaggctagtccgttatcaacttgaaaaagtggcaccgagtcggtgcatggtgagcaagggcgaggagctgttcaccggggtggtgcccatcctggtcgagctggacggcgacgtaaacggccacaagttcagcgtgtccggcgagggcgagggcgatgccacctacggcaagctgaccctgaagttcatctgcaccaccggcaagctgcccgtgccctggcccaccctcgtgaccaccctgacgtacggcgtgcagtgcttacatacaactaacatagggtcaggagcccccccctgaacccaggataaccctcaaagtcggggggc

SEQ ID NO: 19349 - DNA, 372 bp, synthetic construct
  source 1..372: mol_type = other DNA
cgcccttgctcaccagttttagagctagaaatagcaagttaaaataaggctagtccgttatcaacttgaaaaagtggcaccgagtcggtgcatggtgagcaagggcgaggagctgttcaccggggtggtgcccatcctggtcgagctggacggcgacgtaaacggccacaagttcagcgtgtccggcgagggcgagggcgatgccacctacggcaagctgaccctgaagttcatctgcaccaccggcaagctgcccgtgccctggcccaccctcgtgaccaccctgacgtacggcgtgcagtgcttacatacaactaacatagggtcaggagcccccccctgaacccaggataaccctcaaagtcggggggc

SEQ ID NO: 19350 - DNA, 377 bp, synthetic construct
  source 1..377: mol_type = other DNA
ctcctcgcccttgctcaccagttttagagctagaaatagcaagttaaaataaggctagtccgttatcaacttgaaaaagtggcaccgagtcggtgcatggtgagcaagggcgaggagctgttcaccggggtggtgcccatcctggtcgagctggacggcgacgtaaacggccacaagttcagcgtgtccggcgagggcgagggcgatgccacctacggcaagctgaccctgaagttcatctgcaccaccggcaagctgcccgtgccctggcccaccctcgtgaccaccctgacgtacggcgtgcagtgcttacatacaactaacatagggtcaggagcccccccctgaacccaggataaccctcaaagtcggggggc

SEQ ID NO: 19351 - DNA, 308 bp, synthetic construct
  source 1..308: mol_type = other DNA
tggtgagcaagggcggttttagagctagaaatagcaagttaaaataaggctagtccgttatcaacttgaaaaagtggcaccgagtcggtgccggggtggtgcccatcctggtcgagctggacggcgacgtaaacggccacaagttcagcgtgtccggcgagggcgagggcgatgccacctacggcaagctgaccctgaagttcatctgcaccaccggcaagctgcccgtgccctggcccaccctcgtgaccaccctgacgtacggcgtgcagtgcttacatacaagcacatgaggatcacccatgtgc

SEQ ID NO: 19352 - DNA, 313 bp, synthetic construct
  source 1..313: mol_type = other DNA
tggtgagcaagggcggttttagagctagaaatagcaagttaaaataaggctagtccgttatcaacttgaaaaagtggcaccgagtcggtgcttcaccggggtggtgcccatcctggtcgagctggacggcgacgtaaacggccacaagttcagcgtgtccggcgagggcgagggcgatgccacctacggcaagctgaccctgaagttcatctgcaccaccggcaagctgcccgtgccctggcccaccctcgtgaccaccctgacgtacggcgtgcagtgcttacatacaagcacatgaggatcacccatgtgc

SEQ ID NO: 19353 - DNA, 318 bp, synthetic construct
  source 1..318: mol_type = other DNA
tggtgagcaagggcggttttagagctagaaatagcaagttaaaataaggctagtccgttatcaacttgaaaaagtggcaccgagtcggtgcagctgttcaccggggtggtgcccatcctggtcgagctggacggcgacgtaaacggccacaagttcagcgtgtccggcgagggcgagggcgatgccacctacggcaagctgaccctgaagttcatctgcaccaccggcaagctgcccgtgccctggcccaccctcgtgaccaccctgacgtacggcgtgcagtgcttacatacaagcacatgaggatcacccatgtgc

SEQ ID NO: 19354 - DNA, 323 bp, synthetic construct
  source 1..323: mol_type = other DNA
tggtgagcaagggcggttttagagctagaaatagcaagttaaaataaggctagtccgttatcaacttgaaaaagtggcaccgagtcggtgccgaggagctgttcaccggggtggtgcccatcctggtcgagctggacggcgacgtaaacggccacaagttcagcgtgtccggcgagggcgagggcgatgccacctacggcaagctgaccctgaagttcatctgcaccaccggcaagctgcccgtgccctggcccaccctcgtgaccaccctgacgtacggcgtgcagtgcttacatacaagcacatgaggatcacccatgtgc

SEQ ID NO: 19355 - DNA, 328 bp, synthetic construct
  source 1..328: mol_type = other DNA
tggtgagcaagggcggttttagagctagaaatagcaagttaaaataaggctagtccgttatcaacttgaaaaagtggcaccgagtcggtgcaagggcgaggagctgttcaccggggtggtgcccatcctggtcgagctggacggcgacgtaaacggccacaagttcagcgtgtccggcgagggcgagggcgatgccacctacggcaagctgaccctgaagttcatctgcaccaccggcaagctgcccgtgccctggcccaccctcgtgaccaccctgacgtacggcgtgcagtgcttacatacaagcacatgaggatcacccatgtgc

SEQ ID NO: 19356 - DNA, 333 bp, synthetic construct
  source 1..333: mol_type = other DNA
tggtgagcaagggcggttttagagctagaaatagcaagttaaaataaggctagtccgttatcaacttgaaaaagtggcaccgagtcggtgctgagcaagggcgaggagctgttcaccggggtggtgcccatcctggtcgagctggacggcgacgtaaacggccacaagttcagcgtgtccggcgagggcgagggcgatgccacctacggcaagctgaccctgaagttcatctgcaccaccggcaagctgcccgtgccctggcccaccctcgtgaccaccctgacgtacggcgtgcagtgcttacatacaagcacatgaggatcacccatgtgc

SEQ ID NO: 19357 - DNA, 338 bp, synthetic construct
  source 1..338: mol_type = other DNA
tggtgagcaagggcggttttagagctagaaatagcaagttaaaataaggctagtccgttatcaacttgaaaaagtggcaccgagtcggtgccatggtgagcaagggcgaggagctgttcaccggggtggtgcccatcctggtcgagctggacggcgacgtaaacggccacaagttcagcgtgtccggcgagggcgagggcgatgccacctacggcaagctgaccctgaagttcatctgcaccaccggcaagctgcccgtgccctggcccaccctcgtgaccaccctgacgtacggcgtgcagtgcttacatacaagcacatgaggatcacccatgtgc

SEQ ID NO: 19358 - DNA, 343 bp, synthetic construct
  source 1..343: mol_type = other DNA
tggtgagcaagggcggttttagagctagaaatagcaagttaaaataaggctagtccgttatcaacttgaaaaagtggcaccgagtcggtgcgccaccatggtgagcaagggcgaggagctgttcaccggggtggtgcccatcctggtcgagctggacggcgacgtaaacggccacaagttcagcgtgtccggcgagggcgagggcgatgccacctacggcaagctgaccctgaagttcatctgcaccaccggcaagctgcccgtgccctggcccaccctcgtgaccaccctgacgtacggcgtgcagtgcttacatacaagcacatgaggatcacccatgtgc

SEQ ID NO: 19359 - DNA, 348 bp, synthetic construct
  source 1..348: mol_type = other DNA
tggtgagcaagggcggttttagagctagaaatagcaagttaaaataaggctagtccgttatcaacttgaaaaagtggcaccgagtcggtgcccgccgccaccatggtgagcaagggcgaggagctgttcaccggggtggtgcccatcctggtcgagctggacggcgacgtaaacggccacaagttcagcgtgtccggcgagggcgagggcgatgccacctacggcaagctgaccctgaagttcatctgcaccaccggcaagctgcccgtgccctggcccaccctcgtgaccaccctgacgtacggcgtgcagtgcttacatacaagcacatgaggatcacccatgtgc

SEQ ID NO: 19360 - DNA, 353 bp, synthetic construct
  source 1..353: mol_type = other DNA
tggtgagcaagggcggttttagagctagaaatagcaagttaaaataaggctagtccgttatcaacttgaaaaagtggcaccgagtcggtgcagccaccgccgccaccatggtgagcaagggcgaggagctgttcaccggggtggtgcccatcctggtcgagctggacggcgacgtaaacggccacaagttcagcgtgtccggcgagggcgagggcgatgccacctacggcaagctgaccctgaagttcatctgcaccaccggcaagctgcccgtgccctggcccaccctcgtgaccaccctgacgtacggcgtgcagtgcttacatacaagcacatgaggatcacccatgtgc

SEQ ID NO: 19361 - DNA, 358 bp, synthetic construct
  source 1..358: mol_type = other DNA
tggtgagcaagggcggttttagagctagaaatagcaagttaaaataaggctagtccgttatcaacttgaaaaagtggcaccgagtcggtgccctcgagccaccgccgccaccatggtgagcaagggcgaggagctgttcaccggggtggtgcccatcctggtcgagctggacggcgacgtaaacggccacaagttcagcgtgtccggcgagggcgagggcgatgccacctacggcaagctgaccctgaagttcatctgcaccaccggcaagctgcccgtgccctggcccaccctcgtgaccaccctgacgtacggcgtgcagtgcttacatacaagcacatgaggatcacccatgtgc

SEQ ID NO: 19362 - DNA, 363 bp, synthetic construct
  source 1..363: mol_type = other DNA
tggtgagcaagggcggttttagagctagaaatagcaagttaaaataaggctagtccgttatcaacttgaaaaagtggcaccgagtcggtgcacgatcctcgagccaccgccgccaccatggtgagcaagggcgaggagctgttcaccggggtggtgcccatcctggtcgagctggacggcgacgtaaacggccacaagttcagcgtgtccggcgagggcgagggcgatgccacctacggcaagctgaccctgaagttcatctgcaccaccggcaagctgcccgtgccctggcccaccctcgtgaccaccctgacgtacggcgtgcagtgcttacatacaagcacatgaggatcacccatgtgc

SEQ ID NO: 19363 - DNA, 368 bp, synthetic construct
  source 1..368: mol_type = other DNA
tggtgagcaagggcggttttagagctagaaatagcaagttaaaataaggctagtccgttatcaacttgaaaaagtggcaccgagtcggtgccgcctacgatcctcgagccaccgccgccaccatggtgagcaagggcgaggagctgttcaccggggtggtgcccatcctggtcgagctggacggcgacgtaaacggccacaagttcagcgtgtccggcgagggcgagggcgatgccacctacggcaagctgaccctgaagttcatctgcaccaccggcaagctgcccgtgccctggcccaccctcgtgaccaccctgacgtacggcgtgcagtgcttacatacaagcacatgaggatcacccatgtgc

SEQ ID NO: 19364 - DNA, 373 bp, synthetic construct
  source 1..373: mol_type = other DNA
tggtgagcaagggcggttttagagctagaaatagcaagttaaaataaggctagtccgttatcaacttgaaaaagtggcaccgagtcggtgcaccggcgcctacgatcctcgagccaccgccgccaccatggtgagcaagggcgaggagctgttcaccggggtggtgcccatcctggtcgagctggacggcgacgtaaacggccacaagttcagcgtgtccggcgagggcgagggcgatgccacctacggcaagctgaccctgaagttcatctgcaccaccggcaagctgcccgtgccctggcccaccctcgtgaccaccctgacgtacggcgtgcagtgcttacatacaagcacatgaggatcacccatgtgc

SEQ ID NO: 19365 - DNA, 378 bp, synthetic construct
  source 1..378: mol_type = other DNA
tggtgagcaagggcggttttagagctagaaatagcaagttaaaataaggctagtccgttatcaacttgaaaaagtggcaccgagtcggtgcctgtgaccggcgcctacgatcctcgagccaccgccgccaccatggtgagcaagggcgaggagctgttcaccggggtggtgcccatcctggtcgagctggacggcgacgtaaacggccacaagttcagcgtgtccggcgagggcgagggcgatgccacctacggcaagctgaccctgaagttcatctgcaccaccggcaagctgcccgtgccctggcccaccctcgtgaccaccctgacgtacggcgtgcagtgcttacatacaagcacatgaggatcacccatgtgc

SEQ ID NO: 19366 - DNA, 383 bp, synthetic construct
  source 1..383: mol_type = other DNA
tggtgagcaagggcggttttagagctagaaatagcaagttaaaataaggctagtccgttatcaacttgaaaaagtggcaccgagtcggtgcccaagctgtgaccggcgcctacgatcctcgagccaccgccgccaccatggtgagcaagggcgaggagctgttcaccggggtggtgcccatcctggtcgagctggacggcgacgtaaacggccacaagttcagcgtgtccggcgagggcgagggcgatgccacctacggcaagctgaccctgaagttcatctgcaccaccggcaagctgcccgtgccctggcccaccctcgtgaccaccctgacgtacggcgtgcagtgcttacatacaagcacatgaggatcacccatgtgc

SEQ ID NO: 19367 - DNA, 388 bp, synthetic construct
  source 1..388: mol_type = other DNA
tggtgagcaagggcggttttagagctagaaatagcaagttaaaataaggctagtccgttatcaacttgaaaaagtggcaccgagtcggtgccagatccaagctgtgaccggcgcctacgatcctcgagccaccgccgccaccatggtgagcaagggcgaggagctgttcaccggggtggtgcccatcctggtcgagctggacggcgacgtaaacggccacaagttcagcgtgtccggcgagggcgagggcgatgccacctacggcaagctgaccctgaagttcatctgcaccaccggcaagctgcccgtgccctggcccaccctcgtgaccaccctgacgtacggcgtgcagtgcttacatacaagcacatgaggatcacccatgtgc

SEQ ID NO: 19368 - DNA, 393 bp, synthetic construct
  source 1..393: mol_type = other DNA
tggtgagcaagggcggttttagagctagaaatagcaagttaaaataaggctagtccgttatcaacttgaaaaagtggcaccgagtcggtgccgttacagatccaagctgtgaccggcgcctacgatcctcgagccaccgccgccaccatggtgagcaagggcgaggagctgttcaccggggtggtgcccatcctggtcgagctggacggcgacgtaaacggccacaagttcagcgtgtccggcgagggcgagggcgatgccacctacggcaagctgaccctgaagttcatctgcaccaccggcaagctgcccgtgccctggcccaccctcgtgaccaccctgacgtacggcgtgcagtgcttacatacaagcacatgaggatcacccatgtgc

SEQ ID NO: 19369 - DNA, 303 bp, synthetic construct
  source 1..303: mol_type = other DNA
gatccaagctgtgacgttttagagctagaaatagcaagttaaaataaggctagtccgttatcaacttgaaaaagtggcaccgagtcggtgctggtgcccatcctggtcgagctggacggcgacgtaaacggccacaagttcagcgtgtccggcgagggcgagggcgatgccacctacggcaagctgaccctgaagttcatctgcaccaccggcaagctgcccgtgccctggcccaccctcgtgaccaccctgacgtacggcgtgcagtgcttacatacaagcacatgaggatcacccatgtgc

SEQ ID NO: 19370 - DNA, 308 bp, synthetic construct
  source 1..308: mol_type = other DNA
gatccaagctgtgacgttttagagctagaaatagcaagttaaaataaggctagtccgttatcaacttgaaaaagtggcaccgagtcggtgccggggtggtgcccatcctggtcgagctggacggcgacgtaaacggccacaagttcagcgtgtccggcgagggcgagggcgatgccacctacggcaagctgaccctgaagttcatctgcaccaccggcaagctgcccgtgccctggcccaccctcgtgaccaccctgacgtacggcgtgcagtgcttacatacaagcacatgaggatcacccatgtgc

SEQ ID NO: 19371 - DNA, 313 bp, synthetic construct
  source 1..313: mol_type = other DNA
gatccaagctgtgacgttttagagctagaaatagcaagttaaaataaggctagtccgttatcaacttgaaaaagtggcaccgagtcggtgcttcaccggggtggtgcccatcctggtcgagctggacggcgacgtaaacggccacaagttcagcgtgtccggcgagggcgagggcgatgccacctacggcaagctgaccctgaagttcatctgcaccaccggcaagctgcccgtgccctggcccaccctcgtgaccaccctgacgtacggcgtgcagtgcttacatacaagcacatgaggatcacccatgtgc

SEQ ID NO: 19372 - DNA, 318 bp, synthetic construct
  source 1..318: mol_type = other DNA
gatccaagctgtgacgttttagagctagaaatagcaagttaaaataaggctagtccgttatcaacttgaaaaagtggcaccgagtcggtgcagctgttcaccggggtggtgcccatcctggtcgagctggacggcgacgtaaacggccacaagttcagcgtgtccggcgagggcgagggcgatgccacctacggcaagctgaccctgaagttcatctgcaccaccggcaagctgcccgtgccctggcccaccctcgtgaccaccctgacgtacggcgtgcagtgcttacatacaagcacatgaggatcacccatgtgc

SEQ ID NO: 19373 - DNA, 323 bp, synthetic construct
  source 1..323: mol_type = other DNA
gatccaagctgtgacgttttagagctagaaatagcaagttaaaataaggctagtccgttatcaacttgaaaaagtggcaccgagtcggtgccgaggagctgttcaccggggtggtgcccatcctggtcgagctggacggcgacgtaaacggccacaagttcagcgtgtccggcgagggcgagggcgatgccacctacggcaagctgaccctgaagttcatctgcaccaccggcaagctgcccgtgccctggcccaccctcgtgaccaccctgacgtacggcgtgcagtgcttacatacaagcacatgaggatcacccatgtgc

SEQ ID NO: 19374 - DNA, 328 bp, synthetic construct
  source 1..328: mol_type = other DNA
gatccaagctgtgacgttttagagctagaaatagcaagttaaaataaggctagtccgttatcaacttgaaaaagtggcaccgagtcggtgcaagggcgaggagctgttcaccggggtggtgcccatcctggtcgagctggacggcgacgtaaacggccacaagttcagcgtgtccggcgagggcgagggcgatgccacctacggcaagctgaccctgaagttcatctgcaccaccggcaagctgcccgtgccctggcccaccctcgtgaccaccctgacgtacggcgtgcagtgcttacatacaagcacatgaggatcacccatgtgc

SEQ ID NO: 19375 - DNA, 333 bp, synthetic construct
  source 1..333: mol_type = other DNA
gatccaagctgtgacgttttagagctagaaatagcaagttaaaataaggctagtccgttatcaacttgaaaaagtggcaccgagtcggtgctgagcaagggcgaggagctgttcaccggggtggtgcccatcctggtcgagctggacggcgacgtaaacggccacaagttcagcgtgtccggcgagggcgagggcgatgccacctacggcaagctgaccctgaagttcatctgcaccaccggcaagctgcccgtgccctggcccaccctcgtgaccaccctgacgtacggcgtgcagtgcttacatacaagcacatgaggatcacccatgtgc

SEQ ID NO: 19376 - DNA, 338 bp, synthetic construct
  source 1..338: mol_type = other DNA
gatccaagctgtgacgttttagagctagaaatagcaagttaaaataaggctagtccgttatcaacttgaaaaagtggcaccgagtcggtgccatggtgagcaagggcgaggagctgttcaccggggtggtgcccatcctggtcgagctggacggcgacgtaaacggccacaagttcagcgtgtccggcgagggcgagggcgatgccacctacggcaagctgaccctgaagttcatctgcaccaccggcaagctgcccgtgccctggcccaccctcgtgaccaccctgacgtacggcgtgcagtgcttacatacaagcacatgaggatcacccatgtgc

SEQ ID NO: 19377 - DNA, 343 bp, synthetic construct
  source 1..343: mol_type = other DNA
gatccaagctgtgacgttttagagctagaaatagcaagttaaaataaggctagtccgttatcaacttgaaaaagtggcaccgagtcggtgcgccaccatggtgagcaagggcgaggagctgttcaccggggtggtgcccatcctggtcgagctggacggcgacgtaaacggccacaagttcagcgtgtccggcgagggcgagggcgatgccacctacggcaagctgaccctgaagttcatctgcaccaccggcaagctgcccgtgccctggcccaccctcgtgaccaccctgacgtacggcgtgcagtgcttacatacaagcacatgaggatcacccatgtgc

SEQ ID NO: 19378 - DNA, 348 bp, synthetic construct
  source 1..348: mol_type = other DNA
gatccaagctgtgacgttttagagctagaaatagcaagttaaaataaggctagtccgttatcaacttgaaaaagtggcaccgagtcggtgcccgccgccaccatggtgagcaagggcgaggagctgttcaccggggtggtgcccatcctggtcgagctggacggcgacgtaaacggccacaagttcagcgtgtccggcgagggcgagggcgatgccacctacggcaagctgaccctgaagttcatctgcaccaccggcaagctgcccgtgccctggcccaccctcgtgaccaccctgacgtacggcgtgcagtgcttacatacaagcacatgaggatcacccatgtgc

SEQ ID NO: 19379 - DNA, 353 bp, synthetic construct
  source 1..353: mol_type = other DNA
gatccaagctgtgacgttttagagctagaaatagcaagttaaaataaggctagtccgttatcaacttgaaaaagtggcaccgagtcggtgcagccaccgccgccaccatggtgagcaagggcgaggagctgttcaccggggtggtgcccatcctggtcgagctggacggcgacgtaaacggccacaagttcagcgtgtccggcgagggcgagggcgatgccacctacggcaagctgaccctgaagttcatctgcaccaccggcaagctgcccgtgccctggcccaccctcgtgaccaccctgacgtacggcgtgcagtgcttacatacaagcacatgaggatcacccatgtgc

SEQ ID NO: 19380 - DNA, 358 bp, synthetic construct
  source 1..358: mol_type = other DNA
gatccaagctgtgacgttttagagctagaaatagcaagttaaaataaggctagtccgttatcaacttgaaaaagtggcaccgagtcggtgccctcgagccaccgccgccaccatggtgagcaagggcgaggagctgttcaccggggtggtgcccatcctggtcgagctggacggcgacgtaaacggccacaagttcagcgtgtccggcgagggcgagggcgatgccacctacggcaagctgaccctgaagttcatctgcaccaccggcaagctgcccgtgccctggcccaccctcgtgaccaccctgacgtacggcgtgcagtgcttacatacaagcacatgaggatcacccatgtgc

SEQ ID NO: 19381 - DNA, 363 bp, synthetic construct
  source 1..363: mol_type = other DNA
gatccaagctgtgacgttttagagctagaaatagcaagttaaaataaggctagtccgttatcaacttgaaaaagtggcaccgagtcggtgcacgatcctcgagccaccgccgccaccatggtgagcaagggcgaggagctgttcaccggggtggtgcccatcctggtcgagctggacggcgacgtaaacggccacaagttcagcgtgtccggcgagggcgagggcgatgccacctacggcaagctgaccctgaagttcatctgcaccaccggcaagctgcccgtgccctggcccaccctcgtgaccaccctgacgtacggcgtgcagtgcttacatacaagcacatgaggatcacccatgtgc

SEQ ID NO: 19382 - DNA, 368 bp, synthetic construct
  source 1..368: mol_type = other DNA
gatccaagctgtgacgttttagagctagaaatagcaagttaaaataaggctagtccgttatcaacttgaaaaagtggcaccgagtcggtgccgcctacgatcctcgagccaccgccgccaccatggtgagcaagggcgaggagctgttcaccggggtggtgcccatcctggtcgagctggacggcgacgtaaacggccacaagttcagcgtgtccggcgagggcgagggcgatgccacctacggcaagctgaccctgaagttcatctgcaccaccggcaagctgcccgtgccctggcccaccctcgtgaccaccctgacgtacggcgtgcagtgcttacatacaagcacatgaggatcacccatgtgc

SEQ ID NO: 19383 - DNA, 373 bp, synthetic construct
  source 1..373: mol_type = other DNA
gatccaagctgtgacgttttagagctagaaatagcaagttaaaataaggctagtccgttatcaacttgaaaaagtggcaccgagtcggtgcaccggcgcctacgatcctcgagccaccgccgccaccatggtgagcaagggcgaggagctgttcaccggggtggtgcccatcctggtcgagctggacggcgacgtaaacggccacaagttcagcgtgtccggcgagggcgagggcgatgccacctacggcaagctgaccctgaagttcatctgcaccaccggcaagctgcccgtgccctggcccaccctcgtgaccaccctgacgtacggcgtgcagtgcttacatacaagcacatgaggatcacccatgtgc

SEQ ID NO: 19384 - DNA, 378 bp, synthetic construct
  source 1..378: mol_type = other DNA
gatccaagctgtgacgttttagagctagaaatagcaagttaaaataaggctagtccgttatcaacttgaaaaagtggcaccgagtcggtgcctgtgaccggcgcctacgatcctcgagccaccgccgccaccatggtgagcaagggcgaggagctgttcaccggggtggtgcccatcctggtcgagctggacggcgacgtaaacggccacaagttcagcgtgtccggcgagggcgagggcgatgccacctacggcaagctgaccctgaagttcatctgcaccaccggcaagctgcccgtgccctggcccaccctcgtgaccaccctgacgtacggcgtgcagtgcttacatacaagcacatgaggatcacccatgtgc

SEQ ID NO: 19385 - DNA, 383 bp, synthetic construct
  source 1..383: mol_type = other DNA
gatccaagctgtgacgttttagagctagaaatagcaagttaaaataaggctagtccgttatcaacttgaaaaagtggcaccgagtcggtgcccaagctgtgaccggcgcctacgatcctcgagccaccgccgccaccatggtgagcaagggcgaggagctgttcaccggggtggtgcccatcctggtcgagctggacggcgacgtaaacggccacaagttcagcgtgtccggcgagggcgagggcgatgccacctacggcaagctgaccctgaagttcatctgcaccaccggcaagctgcccgtgccctggcccaccctcgtgaccaccctgacgtacggcgtgcagtgcttacatacaagcacatgaggatcacccatgtgc

SEQ ID NO: 19386 - DNA, 388 bp, synthetic construct
  source 1..388: mol_type = other DNA
gatccaagctgtgacgttttagagctagaaatagcaagttaaaataaggctagtccgttatcaacttgaaaaagtggcaccgagtcggtgccagatccaagctgtgaccggcgcctacgatcctcgagccaccgccgccaccatggtgagcaagggcgaggagctgttcaccggggtggtgcccatcctggtcgagctggacggcgacgtaaacggccacaagttcagcgtgtccggcgagggcgagggcgatgccacctacggcaagctgaccctgaagttcatctgcaccaccggcaagctgcccgtgccctggcccaccctcgtgaccaccctgacgtacggcgtgcagtgcttacatacaagcacatgaggatcacccatgtgc

SEQ ID NO: 19387 - DNA, 393 bp, synthetic construct
  source 1..393: mol_type = other DNA
gatccaagctgtgacgttttagagctagaaatagcaagttaaaataaggctagtccgttatcaacttgaaaaagtggcaccgagtcggtgccgttacagatccaagctgtgaccggcgcctacgatcctcgagccaccgccgccaccatggtgagcaagggcgaggagctgttcaccggggtggtgcccatcctggtcgagctggacggcgacgtaaacggccacaagttcagcgtgtccggcgagggcgagggcgatgccacctacggcaagctgaccctgaagttcatctgcaccaccggcaagctgcccgtgccctggcccaccctcgtgaccaccctgacgtacggcgtgcagtgcttacatacaagcacatgaggatcacccatgtgc

SEQ ID NO: 19388 - protein, 2403 aa, synthetic construct
MPAAKRVKLDGGTAPLEEEYRLFLEAPIQNVTLLEQWKREIPKVWAEINPPGLASTQAPIHVQLLSTALPVRVRQYPITLEAKRSLRETIRKFRAAGILRPVHSPWNTPLLPVRKSGTSEYRMVQDLREVNKRVETIHPTVPNPYTLLSLLPPDRIWYSVLDLKDAFFCIPLAPESQLIFAFEWADAEEGESGQLTWTRLPQGFKNSPTLFNEALNRDLQGFRLDHPSVSLLQYVDDLLIAADTQAACLSATRDLLMTLAELGYRVSGKKAQLCQEEVTYLGFKIHKGSRSLSNSRTQAILQIPVPKTKRQVREFLGKIGYCRLFIPGFAELAQPLYAATRPGNDPLVWGEKEEEAFQSLKLALTQPPALALPSLDKPFQLFVEETSGAAKGVLTQALGPWKRPVAYLSKRLDPVAAGWPRCLRAIAAAALLTREASKLTFGQDIEITSSHNLESLLRSPPDKWLTNARITQYQVLLLDPPRVRFKQTAALNPATLLPETDDTLPIHHCLDTLDSLTSTRPDLTDQPLAQAEATLFTDGSSYIRDGKRYAGAAVVTLDSVIWAEPLPIGTSAQKAELIALTKALEWSKDKSVNIYTDSRYAFATLHVHGMIYRERGWLTAGGKAIKNAPEILALLTAVWLPKRVAVMHCKGHQKDDAPTSTGNRRADEVAREVAIRPLSTQATISAEAAAKEAAAKEAAAKEAAAKALEAEAAAKEAAAKEAAAKEAAAKAMASNFTQFVLVDNGGTGDVTVAPSNFANGIAEWISSNSRSQAYKVTCSVRQSSAQKRKYTIKVEVPKGAWRSYLNMELTIPIFATNSDCELIVKAMQGLLKDGNPIPSAIAANSGIYGGSGGSMASNFTQFVLVDNGGTGDVTVAPSNFANGIAEWISSNSRSQAYKVTCSVRQSSAQKRKYTIKVEVPKGAWRSYLNMELTIPIFATNSDCELIVKAMQGLLKDGNPIPSAIAANSGIYAEAAAKEAAAKEAAAKEAAAKALEAEAAAKEAAAKEAAAKEAAAKADKKYSIGLDIGTNSVGWAVITDEYKVPSKKFKVLGNTDRHSIKKNLIGALLFDSGETAEATRLKRTARRRYTRRKNRICYLQEIFSNEMAKVDDSFFHRLEESFLVEEDKKHERHPIFGNIVDEVAYHEKYPTIYHLRKKLVDSTDKADLRLIYLALAHMIKFRGHFLIEGDLNPDNSDVDKLFIQLVQTYNQLFEENPINASGVDAKAILSARLSKSRRLENLIAQLPGEKKNGLFGNLIALSLGLTPNFKSNFDLAEDAKLQLSKDTYDDDLDNLLAQIGDQYADLFLAAKNLSDAILLSDILRVNTEITKAPLSASMIKRYDEHHQDLTLLKALVRQQLPEKYKEIFFDQSKNGYAGYIDGGASQEEFYKFIKPILEKMDGTEELLVKLNREDLLRKQRTFDNGSIPHQIHLGELHAILRRQEDFYPFLKDNREKIEKILTFRIPYYVGPLARGNSRFAWMTRKSEETITPWNFEEVVDKGASAQSFIERMTNFDKNLPNEKVLPKHSLLYEYFTVYNELTKVKYVTEGMRKPAFLSGEQKKAIVDLLFKTNRKVTVKQLKEDYFKKIECFDSVEISGVEDRFNASLGTYHDLLKIIKDKDFLDNEENEDILEDIVLTLTLFEDREMIEERLKTYAHLFDDKVMKQLKRRRYTGWGRLSRKLINGIRDKQSGKTILDFLKSDGFANRNFMQLIHDDSLTFKEDIQKAQVSGQGDSLHEHIANLAGSPAIKKGILQTVKVVDELVKVMGRHKPENIVIEMARENQTTQKGQKNSRERMKRIEEGIKELGSQILKEHPVENTQLQNEKLYLYYLQNGRDMYVDQELDINRLSDYDVDHIVPQSFLKDDSIDNKVLTRSDKARGKSDNVPSEEVVKKMKNYWRQLLNAKLITQRKFDNLTKAERGGLSELDKAGFIKRQLVETRQITKHVAQILDSRMNTKYDENDKLIREVKVITLKSKLVSDFRKDFQFYKVREINNYHHAHDAYLNAVVGTALIKKYPKLESEFVYGDYKVYDVRKMIAKSEQEIGKATAKYFFYSNIMNFFKTEITLANGEIRKRPLIETNGETGEIVWDKGRDFATVRKVLSMPQVNIVKKTEVQTGGFSKESILPKRNSDKLIARKKDWDPKKYGGFDSPTVAYSVLVVAKVEKGKSKKLKSVKELLGITIMERSSFEKNPIDFLEAKGYKEVKKDLIIKLPKYSLFELENGRKRMLASAGELQKGNELALPSKYVNFLYLASHYEKLKGSPEDNEQKQLFVEQHKHYLDEIIEQISEFSKRVILADANLDKVLSAYNKHRDKPIREQAENIIHLFTLTNLGAPAAFKYFDTTIDRKRYTSTKEVLDATLIHQSITGLYETRIDLSQLGGDKRTADGSEFESPKKKAKVE

SEQ ID NO: 19389 - protein, 2423 aa, synthetic construct
MPAAKRVKLDGGDKKYSIGLDIGTNSVGWAVITDEYKVPSKKFKVLGNTDRHSIKKNLIGALLFDSGETAEATRLKRTARRRYTRRKNRICYLQEIFSNEMAKVDDSFFHRLEESFLVEEDKKHERHPIFGNIVDEVAYHEKYPTIYHLRKKLVDSTDKADLRLIYLALAHMIKFRGHFLIEGDLNPDNSDVDKLFIQLVQTYNQLFEENPINASGVDAKAILSARLSKSRRLENLIAQLPGEKKNGLFGNLIALSLGLTPNFKSNFDLAEDAKLQLSKDTYDDDLDNLLAQIGDQYADLFLAAKNLSDAILLSDILRVNTEITKAPLSASMIKRYDEHHQDLTLLKALVRQQLPEKYKEIFFDQSKNGYAGYIDGGASQEEFYKFIKPILEKMDGTEELLVKLNREDLLRKQRTFDNGSIPHQIHLGELHAILRRQEDFYPFLKDNREKIEKILTFRIPYYVGPLARGNSRFAWMTRKSEETITPWNFEEVVDKGASAQSFIERMTNFDKNLPNEKVLPKHSLLYEYFTVYNELTKVKYVTEGMRKPAFLSGEQKKAIVDLLFKTNRKVTVKQLKEDYFKKIECFDSVEISGVEDRFNASLGTYHDLLKIIKDKDFLDNEENEDILEDIVLTLTLFEDREMIEERLKTYAHLFDDKVMKQLKRRRYTGWGRLSRKLINGIRDKQSGKTILDFLKSDGFANRNFMQLIHDDSLTFKEDIQKAQVSGQGDSLHEHIANLAGSPAIKKGILQTVKVVDELVKVMGRHKPENIVIEMARENQTTQKGQKNSRERMKRIEEGIKELGSQILKEHPVENTQLQNEKLYLYYLQNGRDMYVDQELDINRLSDYDVDHIVPQSFLKDDSIDNKVLTRSDKARGKSDNVPSEEVVKKMKNYWRQLLNAKLITQRKFDNLTKAERGGLSELDKAGFIKRQLVETRQITKHVAQILDSRMNTKYDENDKLIREVKVITLKSKLVSDFRKDFQFYKVREINNYHHAHDAYLNAVVGTALIKKYPKLESEFVYGDYKVYDVRKMIAKSEQEIGKATAKYFFYSNIMNFFKTEITLANGEIRKRPLIETNGETGEIVWDKGRDFATVRKVLSMPQVNIVKKTEVQTGGFSKESILPKRNSDKLIARKKDWDPKKYGGFDSPTVAYSVLVVAKVEKGKSKKLKSVKELLGITIMERSSFEKNPIDFLEAKGYKEVKKDLIIKLPKYSLFELENGRKRMLASAGELQKGNELALPSKYVNFLYLASHYEKLKGSPEDNEQKQLFVEQHKHYLDEIIEQISEFSKRVILADANLDKVLSAYNKHRDKPIREQAENIIHLFTLTNLGAPAAFKYFDTTIDRKRYTSTKEVLDATLIHQSITGLYETRIDLSQLGGDAEAAAKEAAAKEAAAKEAAAKALEAEAAAKEAAAKEAAAKEAAAKAMSKTIVLSVGEATRTLTEIQSTADRQIFEEKVGPLVGRLRLTASLRQNGAKTAYRVNLKLDQADVVDSGLPKVRYTQVWSHDVTIVANSTEASRKSLYDLTKSLVATSQVEDLVVNLVPLGRGSGRAGGSGGSMSKTIVLSVGEATRTLTEIQSTADRQIFEEKVGPLVGRLRLTASLRQNGAKTAYRVNLKLDQADVVDSGLPKVRYTQVWSHDVTIVANSTEASRKSLYDLTKSLVATSQVEDLVVNLVPLGRGSGRAAEAAAKEAAAKEAAAKEAAAKALEAEAAAKEAAAKEAAAKEAAAKATAPLEEEYRLFLEAPIQNVTLLEQWKREIPKVWAEINPPGLASTQAPIHVQLLSTALPVRVRQYPITLEAKRSLRETIRKFRAAGILRPVHSPWNTPLLPVRKSGTSEYRMVQDLREVNKRVETIHPTVPNPYTLLSLLPPDRIWYSVLDLKDAFFCIPLAPESQLIFAFEWADAEEGESGQLTWTRLPQGFKNSPTLFNEALNRDLQGFRLDHPSVSLLQYVDDLLIAADTQAACLSATRDLLMTLAELGYRVSGKKAQLCQEEVTYLGFKIHKGSRSLSNSRTQAILQIPVPKTKRQVREFLGKIGYCRLFIPGFAELAQPLYAATRPGNDPLVWGEKEEEAFQSLKLALTQPPALALPSLDKPFQLFVEETSGAAKGVLTQALGPWKRPVAYLSKRLDPVAAGWPRCLRAIAAAALLTREASKLTFGQDIEITSSHNLESLLRSPPDKWLTNARITQYQVLLLDPPRVRFKQTAALNPATLLPETDDTLPIHHCLDTLDSLTSTRPDLTDQPLAQAEATLFTDGSSYIRDGKRYAGAAVVTLDSVIWAEPLPIGTSAQKAELIALTKALEWSKDKSVNIYTDSRYAFATLHVHGMIYRERGWLTAGGKAIKNAPEILALLTAVWLPKRVAVMHCKGHQKDDAPTSTGNRRADEVAREVAIRPLSTQATISKRTADGSEFESPKKKAKVE

SEQ ID NO: 19390 - protein, 2423 aa, synthetic construct
MPAAKRVKLDGGTAPLEEEYRLFLEAPIQNVTLLEQWKREIPKVWAEINPPGLASTQAPIHVQLLSTALPVRVRQYPITLEAKRSLRETIRKFRAAGILRPVHSPWNTPLLPVRKSGTSEYRMVQDLREVNKRVETIHPTVPNPYTLLSLLPPDRIWYSVLDLKDAFFCIPLAPESQLIFAFEWADAEEGESGQLTWTRLPQGFKNSPTLFNEALNRDLQGFRLDHPSVSLLQYVDDLLIAADTQAACLSATRDLLMTLAELGYRVSGKKAQLCQEEVTYLGFKIHKGSRSLSNSRTQAILQIPVPKTKRQVREFLGKIGYCRLFIPGFAELAQPLYAATRPGNDPLVWGEKEEEAFQSLKLALTQPPALALPSLDKPFQLFVEETSGAAKGVLTQALGPWKRPVAYLSKRLDPVAAGWPRCLRAIAAAALLTREASKLTFGQDIEITSSHNLESLLRSPPDKWLTNARITQYQVLLLDPPRVRFKQTAALNPATLLPETDDTLPIHHCLDTLDSLTSTRPDLTDQPLAQAEATLFTDGSSYIRDGKRYAGAAVVTLDSVIWAEPLPIGTSAQKAELIALTKALEWSKDKSVNIYTDSRYAFATLHVHGMIYRERGWLTAGGKAIKNAPEILALLTAVWLPKRVAVMHCKGHQKDDAPTSTGNRRADEVAREVAIRPLSTQATISAEAAAKEAAAKEAAAKEAAAKALEAEAAAKEAAAKEAAAKEAAAKAMSKTIVLSVGEATRTLTEIQSTADRQIFEEKVGPLVGRLRLTASLRQNGAKTAYRVNLKLDQADVVDSGLPKVRYTQVWSHDVTIVANSTEASRKSLYDLTKSLVATSQVEDLVVNLVPLGRGSGRAGGSGGSMSKTIVLSVGEATRTLTEIQSTADRQIFEEKVGPLVGRLRLTASLRQNGAKTAYRVNLKLDQADVVDSGLPKVRYTQVWSHDVTIVANSTEASRKSLYDLTKSLVATSQVEDLVVNLVPLGRGSGRAAEAAAKEAAAKEAAAKEAAAKALEAEAAAKEAAAKEAAAKEAAAKADKKYSIGLDIGTNSVGWAVITDEYKVPSKKFKVLGNTDRHSIKKNLIGALLFDSGETAEATRLKRTARRRYTRRKNRICYLQEIFSNEMAKVDDSFFHRLEESFLVEEDKKHERHPIFGNIVDEVAYHEKYPTIYHLRKKLVDSTDKADLRLIYLALAHMIKFRGHFLIEGDLNPDNSDVDKLFIQLVQTYNQLFEENPINASGVDAKAILSARLSKSRRLENLIAQLPGEKKNGLFGNLIALSLGLTPNFKSNFDLAEDAKLQLSKDTYDDDLDNLLAQIGDQYADLFLAAKNLSDAILLSDILRVNTEITKAPLSASMIKRYDEHHQDLTLLKALVRQQLPEKYKEIFFDQSKNGYAGYIDGGASQEEFYKFIKPILEKMDGTEELLVKLNREDLLRKQRTFDNGSIPHQIHLGELHAILRRQEDFYPFLKDNREKIEKILTFRIPYYVGPLARGNSRFAWMTRKSEETITPWNFEEVVDKGASAQSFIERMTNFDKNLPNEKVLPKHSLLYEYFTVYNELTKVKYVTEGMRKPAFLSGEQKKAIVDLLFKTNRKVTVKQLKEDYFKKIECFDSVEISGVEDRFNASLGTYHDLLKIIKDKDFLDNEENEDILEDIVLTLTLFEDREMIEERLKTYAHLFDDKVMKQLKRRRYTGWGRLSRKLINGIRDKQSGKTILDFLKSDGFANRNFMQLIHDDSLTFKEDIQKAQVSGQGDSLHEHIANLAGSPAIKKGILQTVKVVDELVKVMGRHKPENIVIEMARENQTTQKGQKNSRERMKRIEEGIKELGSQILKEHPVENTQLQNEKLYLYYLQNGRDMYVDQELDINRLSDYDVDHIVPQSFLKDDSIDNKVLTRSDKARGKSDNVPSEEVVKKMKNYWRQLLNAKLITQRKFDNLTKAERGGLSELDKAGFIKRQLVETRQITKHVAQILDSRMNTKYDENDKLIREVKVITLKSKLVSDFRKDFQFYKVREINNYHHAHDAYLNAVVGTALIKKYPKLESEFVYGDYKVYDVRKMIAKSEQEIGKATAKYFFYSNIMNFFKTEITLANGEIRKRPLIETNGETGEIVWDKGRDFATVRKVLSMPQVNIVKKTEVQTGGFSKESILPKRNSDKLIARKKDWDPKKYGGFDSPTVAYSVLVVAKVEKGKSKKLKSVKELLGITIMERSSFEKNPIDFLEAKGYKEVKKDLIIKLPKYSLFELENGRKRMLASAGELQKGNELALPSKYVNFLYLASHYEKLKGSPEDNEQKQLFVEQHKHYLDEIIEQISEFSKRVILADANLDKVLSAYNKHRDKPIREQAENIIHLFTLTNLGAPAAFKYFDTTIDRKRYTSTKEVLDATLIHQSITGLYETRIDLSQLGGDKRTADGSEFESPKKKAKVE

SEQ ID NO: 19391 - protein, 2230 aa, synthetic construct
MPAAKRVKLDGGTAPLEEEYRLFLEAPIQNVTLLEQWKREIPKVWAEINPPGLASTQAPIHVQLLSTALPVRVRQYPITLEAKRSLRETIRKFRAAGILRPVHSPWNTPLLPVRKSGTSEYRMVQDLREVNKRVETIHPTVPNPYTLLSLLPPDRIWYSVLDLKDAFFCIPLAPESQLIFAFEWADAEEGESGQLTWTRLPQGFKNSPTLFNEALNRDLQGFRLDHPSVSLLQYVDDLLIAADTQAACLSATRDLLMTLAELGYRVSGKKAQLCQEEVTYLGFKIHKGSRSLSNSRTQAILQIPVPKTKRQVREFLGKIGYCRLFIPGFAELAQPLYAATRPGNDPLVWGEKEEEAFQSLKLALTQPPALALPSLDKPFQLFVEETSGAAKGVLTQALGPWKRPVAYLSKRLDPVAAGWPRCLRAIAAAALLTREASKLTFGQDIEITSSHNLESLLRSPPDKWLTNARITQYQVLLLDPPRVRFKQTAALNPATLLPETDDTLPIHHCLDTLDSLTSTRPDLTDQPLAQAEATLFTDGSSYIRDGKRYAGAAVVTLDSVIWAEPLPIGTSAQKAELIALTKALEWSKDKSVNIYTDSRYAFATLHVHGMIYRERGWLTAGGKAIKNAPEILALLTAVWLPKRVAVMHCKGHQKDDAPTSTGNRRADEVAREVAIRPLSTQATISAEAAAKEAAAKEAAAKEAAAKALEAEAAAKEAAAKEAAAKEAAAKAMKSIRCKNCNKLLFKADSFDHIEIRCPRCKRHIIMLNACEHPTEKHCGKREKITHSDETVRYGSGRAAEAAAKEAAAKEAAAKEAAAKALEAEAAAKEAAAKEAAAKEAAAKADKKYSIGLDIGTNSVGWAVITDEYKVPSKKFKVLGNTDRHSIKKNLIGALLFDSGETAEATRLKRTARRRYTRRKNRICYLQEIFSNEMAKVDDSFFHRLEESFLVEEDKKHERHPIFGNIVDEVAYHEKYPTIYHLRKKLVDSTDKADLRLIYLALAHMIKFRGHFLIEGDLNPDNSDVDKLFIQLVQTYNQLFEENPINASGVDAKAILSARLSKSRRLENLIAQLPGEKKNGLFGNLIALSLGLTPNFKSNFDLAEDAKLQLSKDTYDDDLDNLLAQIGDQYADLFLAAKNLSDAILLSDILRVNTEITKAPLSASMIKRYDEHHQDLTLLKALVRQQLPEKYKEIFFDQSKNGYAGYIDGGASQEEFYKFIKPILEKMDGTEELLVKLNREDLLRKQRTFDNGSIPHQIHLGELHAILRRQEDFYPFLKDNREKIEKILTFRIPYYVGPLARGNSRFAWMTRKSEETITPWNFEEVVDKGASAQSFIERMTNFDKNLPNEKVLPKHSLLYEYFTVYNELTKVKYVTEGMRKPAFLSGEQKKAIVDLLFKTNRKVTVKQLKEDYFKKIECFDSVEISGVEDRFNASLGTYHDLLKIIKDKDFLDNEENEDILEDIVLTLTLFEDREMIEERLKTYAHLFDDKVMKQLKRRRYTGWGRLSRKLINGIRDKQSGKTILDFLKSDGFANRNFMQLIHDDSLTFKEDIQKAQVSGQGDSLHEHIANLAGSPAIKKGILQTVKVVDELVKVMGRHKPENIVIEMARENQTTQKGQKNSRERMKRIEEGIKELGSQILKEHPVENTQLQNEKLYLYYLQNGRDMYVDQELDINRLSDYDVDHIVPQSFLKDDSIDNKVLTRSDKARGKSDNVPSEEVVKKMKNYWRQLLNAKLITQRKFDNLTKAERGGLSELDKAGFIKRQLVETRQITKHVAQILDSRMNTKYDENDKLIREVKVITLKSKLVSDFRKDFQFYKVREINNYHHAHDAYLNAVVGTALIKKYPKLESEFVYGDYKVYDVRKMIAKSEQEIGKATAKYFFYSNIMNFFKTEITLANGEIRKRPLIETNGETGEIVWDKGRDFATVRKVLSMPQVNIVKKTEVQTGGFSKESILPKRNSDKLIARKKDWDPKKYGGFDSPTVAYSVLVVAKVEKGKSKKLKSVKELLGITIMERSSFEKNPIDFLEAKGYKEVKKDLIIKLPKYSLFELENGRKRMLASAGELQKGNELALPSKYVNFLYLASHYEKLKGSPEDNEQKQLFVEQHKHYLDEIIEQISEFSKRVILADANLDKVLSAYNKHRDKPIREQAENIIHLFTLTNLGAPAAFKYFDTTIDRKRYTSTKEVLDATLIHQSITGLYETRIDLSQLGGDKRTADGSEFESPKKKAKVE

SEQ ID NO: 19392 - protein, 2388 aa, synthetic construct
MPAAKRVKLDGGDKKYSIGLDIGTNSVGWAVITDEYKVPSKKFKVLGNTDRHSIKKNLIGALLFDSGETAEATRLKRTARRRYTRRKNRICYLQEIFSNEMAKVDDSFFHRLEESFLVEEDKKHERHPIFGNIVDEVAYHEKYPTIYHLRKKLVDSTDKADLRLIYLALAHMIKFRGHFLIEGDLNPDNSDVDKLFIQLVQTYNQLFEENPINASGVDAKAILSARLSKSRRLENLIAQLPGEKKNGLFGNLIALSLGLTPNFKSNFDLAEDAKLQLSKDTYDDDLDNLLAQIGDQYADLFLAAKNLSDAILLSDILRVNTEITKAPLSASMIKRYDEHHQDLTLLKALVRQQLPEKYKEIFFDQSKNGYAGYIDGGASQEEFYKFIKPILEKMDGTEELLVKLNREDLLRKQRTFDNGSIPHQIHLGELHAILRRQEDFYPFLKDNREKIEKILTFRIPYYVGPLARGNSRFAWMTRKSEETITPWNFEEVVDKGASAQSFIERMTNFDKNLPNEKVLPKHSLLYEYFTVYNELTKVKYVTEGMRKPAFLSGEQKKAIVDLLFKTNRKVTVKQLKEDYFKKIECFDSVEISGVEDRFNASLGTYHDLLKIIKDKDFLDNEENEDILEDIVLTLTLFEDREMIEERLKTYAHLFDDKVMKQLKRRRYTGWGRLSRKLINGIRDKQSGKTILDFLKSDGFANRNFMQLIHDDSLTFKEDIQKAQVSGQGDSLHEHIANLAGSPAIKKGILQTVKVVDELVKVMGRHKPENIVIEMARENQTTQKGQKNSRERMKRIEEGIKELGSQILKEHPVENTQLQNEKLYLYYLQNGRDMYVDQELDINRLSDYDVDHIVPQSFLKDDSIDNKVLTRSDKARGKSDNVPSEEVVKKMKNYWRQLLNAKLITQRKFDNLTKAERGGLSELDKAGFIKRQLVETRQITKHVAQILDSRMNTKYDENDKLIREVKVITLKSKLVSDFRKDFQFYKVREINNYHHAHDAYLNAVVGTALIKKYPKLESEFVYGDYKVYDVRKMIAKSEQEIGKATAKYFFYSNIMNFFKTEITLANGEIRKRPLIETNGETGEIVWDKGRDFATVRKVLSMPQVNIVKKTEVQTGGFSKESILPKRNSDKLIARKKDWDPKKYGGFDSPTVAYSVLVVAKVEKGKSKKLKSVKELLGITIMERSSFEKNPIDFLEAKGYKEVKKDLIIKLPKYSLFELENGRKRMLASAGELQKGNELALPSKYVNFLYLASHYEKLKGSPEDNEQKQLFVEQHKHYLDEIIEQISEFSKRVILADANLDKVLSAYNKHRDKPIREQAENIIHLFTLTNLGAPAAFKYFDTTIDRKRYTSTKEVLDATLIHQSITGLYETRIDLSQLGGDAEAAAKEAAAKEAAAKEAAAKALEAEAAAKEAAAKEAAAKEAAAKATAPLEEEYRLFLEAPIQNVTLLEQWKREIPKVWAEINPPGLASTQAPIHVQLLSTALPVRVRQYPITLEAKRSLRETIRKFRAAGILRPVHSPWNTPLLPVRKSGTSEYRMVQDLREVNKRVETIHPTVPNPYTLLSLLPPDRIWYSVLDLKDAFFCIPLAPESQLIFAFEWADAEEGESGQLTWTRLPQGFKNSPTLFNEALNRDLQGFRLDHPSVSLLQYVDDLLIAADTQAACLSATRDLLMTLAELGYRVSGKKAQLCQEEVTYLGFKIHKGSRSLSNSRTQAILQIPVPKTKRQVREFLGKIGYCRLFIPGFAELAQPLYAATRPGNDPLVWGEKEEEAFQSLKLALTQPPALALPSLDKPFQLFVEETSGAAKGVLTQALGPWKRPVAYLSKRLDPVAAGWPRCLRAIAAAALLTREASKLTFGQDIEITSSHNLESLLRSPPDKWLTNARITQYQVLLLDPPRVRFKQTAALNPATLLPETDDTLPIHHCLDTLDSLTSTRPDLTDQPLAQAEATLFTDGSSYIRDGKRYAGAAVVTLDSVIWAEPLPIGTSAQKAELIALTKALEWSKDKSVNIYTDSRYAFATLHVHGMIYRERGWLTAGGKAIKNAPEILALLTAVWLPKRVAVMHCKGHQKDDAPTSTGNRRADEVAREVAIRPLSTQATISGSSGGGEAAAKMSKTIVLSVGEATRTLTEIQSTADRQIFEEKVGPLVGRLRLTASLRQNGAKTAYRVNLKLDQADVVDSGLPKVRYTQVWSHDVTIVANSTEASRKSLYDLTKSLVATSQVEDLVVNLVPLGRGSGRAGGSGGSMSKTIVLSVGEATRTLTEIQSTADRQIFEEKVGPLVGRLRLTASLRQNGAKTAYRVNLKLDQADVVDSGLPKVRYTQVWSHDVTIVANSTEASRKSLYDLTKSLVATSQVEDLVVNLVPLGRGSGRAKRTADGSEFESPKKKAKVE

SEQ ID NO: 19393 - protein, 2195 aa, synthetic construct
MPAAKRVKLDGGDKKYSIGLDIGTNSVGWAVITDEYKVPSKKFKVLGNTDRHSIKKNLIGALLFDSGETAEATRLKRTARRRYTRRKNRICYLQEIFSNEMAKVDDSFFHRLEESFLVEEDKKHERHPIFGNIVDEVAYHEKYPTIYHLRKKLVDSTDKADLRLIYLALAHMIKFRGHFLIEGDLNPDNSDVDKLFIQLVQTYNQLFEENPINASGVDAKAILSARLSKSRRLENLIAQLPGEKKNGLFGNLIALSLGLTPNFKSNFDLAEDAKLQLSKDTYDDDLDNLLAQIGDQYADLFLAAKNLSDAILLSDILRVNTEITKAPLSASMIKRYDEHHQDLTLLKALVRQQLPEKYKEIFFDQSKNGYAGYIDGGASQEEFYKFIKPILEKMDGTEELLVKLNREDLLRKQRTFDNGSIPHQIHLGELHAILRRQEDFYPFLKDNREKIEKILTFRIPYYVGPLARGNSRFAWMTRKSEETITPWNFEEVVDKGASAQSFIERMTNFDKNLPNEKVLPKHSLLYEYFTVYNELTKVKYVTEGMRKPAFLSGEQKKAIVDLLFKTNRKVTVKQLKEDYFKKIECFDSVEISGVEDRFNASLGTYHDLLKIIKDKDFLDNEENEDILEDIVLTLTLFEDREMIEERLKTYAHLFDDKVMKQLKRRRYTGWGRLSRKLINGIRDKQSGKTILDFLKSDGFANRNFMQLIHDDSLTFKEDIQKAQVSGQGDSLHEHIANLAGSPAIKKGILQTVKVVDELVKVMGRHKPENIVIEMARENQTTQKGQKNSRERMKRIEEGIKELGSQILKEHPVENTQLQNEKLYLYYLQNGRDMYVDQELDINRLSDYDVDHIVPQSFLKDDSIDNKVLTRSDKARGKSDNVPSEEVVKKMKNYWRQLLNAKLITQRKFDNLTKAERGGLSELDKAGFIKRQLVETRQITKHVAQILDSRMNTKYDENDKLIREVKVITLKSKLVSDFRKDFQFYKVREINNYHHAHDAYLNAVVGTALIKKYPKLESEFVYGDYKVYDVRKMIAKSEQEIGKATAKYFFYSNIMNFFKTEITLANGEIRKRPLIETNGETGEIVWDKGRDFATVRKVLSMPQVNIVKKTEVQTGGFSKESILPKRNSDKLIARKKDWDPKKYGGFDSPTVAYSVLVVAKVEKGKSKKLKSVKELLGITIMERSSFEKNPIDFLEAKGYKEVKKDLIIKLPKYSLFELENGRKRMLASAGELQKGNELALPSKYVNFLYLASHYEKLKGSPEDNEQKQLFVEQHKHYLDEIIEQISEFSKRVILADANLDKVLSAYNKHRDKPIREQAENIIHLFTLTNLGAPAAFKYFDTTIDRKRYTSTKEVLDATLIHQSITGLYETRIDLSQLGGDAEAAAKEAAAKEAAAKEAAAKALEAEAAAKEAAAKEAAAKEAAAKATAPLEEEYRLFLEAPIQNVTLLEQWKREIPKVWAEINPPGLASTQAPIHVQLLSTALPVRVRQYPITLEAKRSLRETIRKFRAAGILRPVHSPWNTPLLPVRKSGTSEYRMVQDLREVNKRVETIHPTVPNPYTLLSLLPPDRIWYSVLDLKDAFFCIPLAPESQLIFAFEWADAEEGESGQLTWTRLPQGFKNSPTLFNEALNRDLQGFRLDHPSVSLLQYVDDLLIAADTQAACLSATRDLLMTLAELGYRVSGKKAQLCQEEVTYLGFKIHKGSRSLSNSRTQAILQIPVPKTKRQVREFLGKIGYCRLFIPGFAELAQPLYAATRPGNDPLVWGEKEEEAFQSLKLALTQPPALALPSLDKPFQLFVEETSGAAKGVLTQALGPWKRPVAYLSKRLDPVAAGWPRCLRAIAAAALLTREASKLTFGQDIEITSSHNLESLLRSPPDKWLTNARITQYQVLLLDPPRVRFKQTAALNPATLLPETDDTLPIHHCLDTLDSLTSTRPDLTDQPLAQAEATLFTDGSSYIRDGKRYAGAAVVTLDSVIWAEPLPIGTSAQKAELIALTKALEWSKDKSVNIYTDSRYAFATLHVHGMIYRERGWLTAGGKAIKNAPEILALLTAVWLPKRVAVMHCKGHQKDDAPTSTGNRRADEVAREVAIRPLSTQATISGSSGGGEAAAKMKSIRCKNCNKLLFKADSFDHIEIRCPRCKRHIIMLNACEHPTEKHCGKREKITHSDETVRYGSGRAKRTADGSEFESPKKKAKVE

SEQ ID NO: 19394 - DNA, 406 bp, synthetic construct
  source 1..406: mol_type = other DNA
cgaggagctgttcaccgggggttttagagctagaaatagcaagttaaaataaggctagtccgttatcaacttgaaaaagtggcaccgagtcggtgcatggtgagcaagggcgaggagctgttcaccggggtggtgcccatcctggtcgagctggacggcgacgtaaacggccacaagttcagcgtgtccggcgagggcgagggcgatgccacctacggcaagctgaccctgaagttcatctgcaccaccggcaagctgcccgtgccctggcccaccctcgtgaccaccctgacgtacggcgtgcagtgcttacatacaactaacatagggagctaaggagtttatatggaaacccttagcctgctgcgtaaggagtttatatggaaacccttacgcagcagttccc

SEQ ID NO: 19395 - DNA, 338 bp, synthetic construct
  source 1..338: mol_type = other DNA
cgaggagctgttcaccgggggttttagagctagaaatagcaagttaaaataaggctagtccgttatcaacttgaaaaagtggcaccgagtcggtgcatggtgagcaagggcgaggagctgttcaccggggtggtgcccatcctggtcgagctggacggcgacgtaaacggccacaagttcagcgtgtccggcgagggcgagggcgatgccacctacggcaagctgaccctgaagttcatctgcaccaccggcaagctgcccgtgccctggcccaccctcgtgaccaccctgacgtacggcgtgcagtgcttacatacaactgaatgcctgcgagcatc

SEQ ID NO: 19396 - protein, 2033 aa, synthetic construct
MPAAKRVKLDGGDKKYSIGLDIGTNSVGWAVITDEYKVPSKKFKVLGNTDRHSIKKNLIGALLFDSGETAEATRLKRTARRRYTRRKNRICYLQEIFSNEMAKVDDSFFHRLEESFLVEEDKKHERHPIFGNIVDEVAYHEKYPTIYHLRKKLVDSTDKADLRLIYLALAHMIKFRGHFLIEGDLNPDNSDVDKLFIQLVQTYNQLFEENPINASGVDAKAILSARLSKSRRLENLIAQLPGEKKNGLFGNLIALSLGLTPNFKSNFDLAEDAKLQLSKDTYDDDLDNLLAQIGDQYADLFLAAKNLSDAILLSDILRVNTEITKAPLSASMIKRYDEHHQDLTLLKALVRQQLPEKYKEIFFDQSKNGYAGYIDGGASQEEFYKFIKPILEKMDGTEELLVKLNREDLLRKQRTFDNGSIPHQIHLGELHAILRRQEDFYPFLKDNREKIEKILTFRIPYYVGPLARGNSRFAWMTRKSEETITPWNFEEVVDKGASAQSFIERMTNFDKNLPNEKVLPKHSLLYEYFTVYNELTKVKYVTEGMRKPAFLSGEQKKAIVDLLFKTNRKVTVKQLKEDYFKKIECFDSVEISGVEDRFNASLGTYHDLLKIIKDKDFLDNEENEDILEDIVLTLTLFEDREMIEERLKTYAHLFDDKVMKQLKRRRYTGWGRLSRKLINGIRDKQSGKTILDFLKSDGFANRNFMQLIHDDSLTFKEDIQKAQVSGQGDSLHEHIANLAGSPAIKKGILQTVKVVDELVKVMGRHKPENIVIEMARENQTTQKGQKNSRERMKRIEEGIKELGSQILKEHPVENTQLQNEKLYLYYLQNGRDMYVDQELDINRLSDYDVDHIVPQSFLKDDSIDNKVLTRSDKARGKSDNVPSEEVVKKMKNYWRQLLNAKLITQRKFDNLTKAERGGLSELDKAGFIKRQLVETRQITKHVAQILDSRMNTKYDENDKLIREVKVITLKSKLVSDFRKDFQFYKVREINNYHHAHDAYLNAVVGTALIKKYPKLESEFVYGDYKVYDVRKMIAKSEQEIGKATAKYFFYSNIMNFFKTEITLANGEIRKRPLIETNGETGEIVWDKGRDFATVRKVLSMPQVNIVKKTEVQTGGFSKESILPKRNSDKLIARKKDWDPKKYGGFDSPTVAYSVLVVAKVEKGKSKKLKSVKELLGITIMERSSFEKNPIDFLEAKGYKEVKKDLIIKLPKYSLFELENGRKRMLASAGELQKGNELALPSKYVNFLYLASHYEKLKGSPEDNEQKQLFVEQHKHYLDEIIEQISEFSKRVILADANLDKVLSAYNKHRDKPIREQAENIIHLFTLTNLGAPAAFKYFDTTIDRKRYTSTKEVLDATLIHQSITGLYETRIDLSQLGGDAEAAAKEAAAKEAAAKEAAAKALEAEAAAKEAAAKEAAAKEAAAKAMASNFTQFVLVDNGGTGDVTVAPSNFANGIAEWISSNSRSQAYKVTCSVRQSSAQNRKYTIKVEVPKGAWRSYLNMELTIPIFATNSDCELIVKAMQGLLKDGNPIPSAIAANSGIYAEAAAKEAAAKEAAAKEAAAKALEAEAAAKEAAAKEAAAKEAAAKADTSNLMEQILSSDNLNRAYLQVVRNKGAEGVDGMKYTELKEHLAKNGETIKGQLRTRKYKPQPARRVEIPKPDGGVRNLGVPTVTDRFIQQAIAQVLTPIYEEQFHDHSYGFRPNRCAQQAILTALNIMNDGNDWIVDIDLEKFFDTVNHDKLMTLIGRTIKDGDVISIVRKYLVSGIMIDDEYEDSIVGTPQGGNLSPLLANIMLNELDKEMEKRGLNFVRYADDCIIMVGSEMSANRVMRNISRFIEEKLGLKVNMTKSKVDRPSGLKYLGFGFYFDPRAHQFKAKPHAKSVAKFKKRMKELTCRSWGVSNSYKVEKLNQLIRGWINYFKIGSMKTLCKELDSRIRYRLRMCIWKQWKTPQNQEKNLVKLGIDRNTARRVAYTGKRIAYVCNKGAVNVAISNKRLASFGLISMLDYYIEKCVTCKRTADGSEFESPKKKAKVE

SEQ ID NO: 19397 - protein, 2033 aa, synthetic construct
MPAAKRVKLDGGDTSNLMEQILSSDNLNRAYLQVVRNKGAEGVDGMKYTELKEHLAKNGETIKGQLRTRKYKPQPARRVEIPKPDGGVRNLGVPTVTDRFIQQAIAQVLTPIYEEQFHDHSYGFRPNRCAQQAILTALNIMNDGNDWIVDIDLEKFFDTVNHDKLMTLIGRTIKDGDVISIVRKYLVSGIMIDDEYEDSIVGTPQGGNLSPLLANIMLNELDKEMEKRGLNFVRYADDCIIMVGSEMSANRVMRNISRFIEEKLGLKVNMTKSKVDRPSGLKYLGFGFYFDPRAHQFKAKPHAKSVAKFKKRMKELTCRSWGVSNSYKVEKLNQLIRGWINYFKIGSMKTLCKELDSRIRYRLRMCIWKQWKTPQNQEKNLVKLGIDRNTARRVAYTGKRIAYVCNKGAVNVAISNKRLASFGLISMLDYYIEKCVTCAEAAAKEAAAKEAAAKEAAAKALEAEAAAKEAAAKEAAAKEAAAKAMASNFTQFVLVDNGGTGDVTVAPSNFANGIAEWISSNSRSQAYKVTCSVRQSSAQNRKYTIKVEVPKGAWRSYLNMELTIPIFATNSDCELIVKAMQGLLKDGNPIPSAIAANSGIYAEAAAKEAAAKEAAAKEAAAKALEAEAAAKEAAAKEAAAKEAAAKADKKYSIGLDIGTNSVGWAVITDEYKVPSKKFKVLGNTDRHSIKKNLIGALLFDSGETAEATRLKRTARRRYTRRKNRICYLQEIFSNEMAKVDDSFFHRLEESFLVEEDKKHERHPIFGNIVDEVAYHEKYPTIYHLRKKLVDSTDKADLRLIYLALAHMIKFRGHFLIEGDLNPDNSDVDKLFIQLVQTYNQLFEENPINASGVDAKAILSARLSKSRRLENLIAQLPGEKKNGLFGNLIALSLGLTPNFKSNFDLAEDAKLQLSKDTYDDDLDNLLAQIGDQYADLFLAAKNLSDAILLSDILRVNTEITKAPLSASMIKRYDEHHQDLTLLKALVRQQLPEKYKEIFFDQSKNGYAGYIDGGASQEEFYKFIKPILEKMDGTEELLVKLNREDLLRKQRTFDNGSIPHQIHLGELHAILRRQEDFYPFLKDNREKIEKILTFRIPYYVGPLARGNSRFAWMTRKSEETITPWNFEEVVDKGASAQSFIERMTNFDKNLPNEKVLPKHSLLYEYFTVYNELTKVKYVTEGMRKPAFLSGEQKKAIVDLLFKTNRKVTVKQLKEDYFKKIECFDSVEISGVEDRFNASLGTYHDLLKIIKDKDFLDNEENEDILEDIVLTLTLFEDREMIEERLKTYAHLFDDKVMKQLKRRRYTGWGRLSRKLINGIRDKQSGKTILDFLKSDGFANRNFMQLIHDDSLTFKEDIQKAQVSGQGDSLHEHIANLAGSPAIKKGILQTVKVVDELVKVMGRHKPENIVIEMARENQTTQKGQKNSRERMKRIEEGIKELGSQILKEHPVENTQLQNEKLYLYYLQNGRDMYVDQELDINRLSDYDVDHIVPQSFLKDDSIDNKVLTRSDKARGKSDNVPSEEVVKKMKNYWRQLLNAKLITQRKFDNLTKAERGGLSELDKAGFIKRQLVETRQITKHVAQILDSRMNTKYDENDKLIREVKVITLKSKLVSDFRKDFQFYKVREINNYHHAHDAYLNAVVGTALIKKYPKLESEFVYGDYKVYDVRKMIAKSEQEIGKATAKYFFYSNIMNFFKTEITLANGEIRKRPLIETNGETGEIVWDKGRDFATVRKVLSMPQVNIVKKTEVQTGGFSKESILPKRNSDKLIARKKDWDPKKYGGFDSPTVAYSVLVVAKVEKGKSKKLKSVKELLGITIMERSSFEKNPIDFLEAKGYKEVKKDLIIKLPKYSLFELENGRKRMLASAGELQKGNELALPSKYVNFLYLASHYEKLKGSPEDNEQKQLFVEQHKHYLDEIIEQISEFSKRVILADANLDKVLSAYNKHRDKPIREQAENIIHLFTLTNLGAPAAFKYFDTTIDRKRYTSTKEVLDATLIHQSITGLYETRIDLSQLGGDKRTADGSEFESPKKKAKVE

SEQ ID NO: 19398 - protein, 2377 aa, synthetic construct
MPAAKRVKLDGGDKKYSIGLDIGTNSVGWAVITDEYKVPSKKFKVLGNTDRHSIKKNLIGALLFDSGETAEATRLKRTARRRYTRRKNRICYLQEIFSNEMAKVDDSFFHRLEESFLVEEDKKHERHPIFGNIVDEVAYHEKYPTIYHLRKKLVDSTDKADLRLIYLALAHMIKFRGHFLIEGDLNPDNSDVDKLFIQLVQTYNQLFEENPINASGVDAKAILSARLSKSRRLENLIAQLPGEKKNGLFGNLIALSLGLTPNFKSNFDLAEDAKLQLSKDTYDDDLDNLLAQIGDQYADLFLAAKNLSDAILLSDILRVNTEITKAPLSASMIKRYDEHHQDLTLLKALVRQQLPEKYKEIFFDQSKNGYAGYIDGGASQEEFYKFIKPILEKMDGTEELLVKLNREDLLRKQRTFDNGSIPHQIHLGELHAILRRQEDFYPFLKDNREKIEKILTFRIPYYVGPLARGNSRFAWMTRKSEETITPWNFEEVVDKGASAQSFIERMTNFDKNLPNEKVLPKHSLLYEYFTVYNELTKVKYVTEGMRKPAFLSGEQKKAIVDLLFKTNRKVTVKQLKEDYFKKIECFDSVEISGVEDRFNASLGTYHDLLKIIKDKDFLDNEENEDILEDIVLTLTLFEDREMIEERLKTYAHLFDDKVMKQLKRRRYTGWGRLSRKLINGIRDKQSGKTILDFLKSDGFANRNFMQLIHDDSLTFKEDIQKAQVSGQGDSLHEHIANLAGSPAIKKGILQTVKVVDELVKVMGRHKPENIVIEMARENQTTQKGQKNSRERMKRIEEGIKELGSQILKEHPVENTQLQNEKLYLYYLQNGRDMYVDQELDINRLSDYDVDHIVPQSFLKDDSIDNKVLTRSDKARGKSDNVPSEEVVKKMKNYWRQLLNAKLITQRKFDNLTKAERGGLSELDKAGFIKRQLVETRQITKHVAQILDSRMNTKYDENDKLIREVKVITLKSKLVSDFRKDFQFYKVREINNYHHAHDAYLNAVVGTALIKKYPKLESEFVYGDYKVYDVRKMIAKSEQEIGKATAKYFFYSNIMNFFKTEITLANGEIRKRPLIETNGETGEIVWDKGRDFATVRKVLSMPQVNIVKKTEVQTGGFSKESILPKRNSDKLIARKKDWDPKKYGGFDSPTVAYSVLVVAKVEKGKSKKLKSVKELLGITIMERSSFEKNPIDFLEAKGYKEVKKDLIIKLPKYSLFELENGRKRMLASAGELQKGNELALPSKYVNFLYLASHYEKLKGSPEDNEQKQLFVEQHKHYLDEIIEQISEFSKRVILADANLDKVLSAYNKHRDKPIREQAENIIHLFTLTNLGAPAAFKYFDTTIDRKRYTSTKEVLDATLIHQSITGLYETRIDLSQLGGDAEAAAKEAAAKEAAAKEAAAKALEAEAAAKEAAAKEAAAKEAAAKADTSNLMEQILSSDNLNRAYLQVVRNKGAEGVDGMKYTELKEHLAKNGETIKGQLRTRKYKPQPARRVEIPKPDGGVRNLGVPTVTDRFIQQAIAQVLTPIYEEQFHDHSYGFRPNRCAQQAILTALNIMNDGNDWIVDIDLEKFFDTVNHDKLMTLIGRTIKDGDVISIVRKYLVSGIMIDDEYEDSIVGTPQGGNLSPLLANIMLNELDKEMEKRGLNFVRYADDCIIMVGSEMSANRVMRNISRFIEEKLGLKVNMTKSKVDRPSGLKYLGFGFYFDPRAHQFKAKPHAKSVAKFKKRMKELTCRSWGVSNSYKVEKLNQLIRGWINYFKIGSMKTLCKELDSRIRYRLRMCIWKQWKTPQNQEKNLVKLGIDRNTARRVAYTGKRIAYVCNKGAVNVAISNKRLASFGLISMLDYYIEKCVTCGSSGGGEAAAKMASNFTQFVLVDNGGTGDVTVAPSNFANGIAEWISSNSRSQAYKVTCSVRQSSAQNRKYTIKVEVPKGAWRSYLNMELTIPIFATNSDCELIVKAMQGLLKDGNPIPSAIAANSGIYGGSGGSMASNFTQFVLVDNGGTGDVTVAPSNFANGIAEWISSNSRSQAYKVTCSVRQSSAQNRKYTIKVEVPKGAWRSYLNMELTIPIFATNSDCELIVKAMQGLLKDGNPIPSAIAANSGIYGGGSGGGSGGGSGGGSMASNFTQFVLVDNGGTGDVTVAPSNFANGIAEWISSNSRSQAYKVTCSVRQSSAQNRKYTIKVEVPKGAWRSYLNMELTIPIFATNSDCELIVKAMQGLLKDGNPIPSAIAANSGIYGGSGGSMASNFTQFVLVDNGGTGDVTVAPSNFANGIAEWISSNSRSQAYKVTCSVRQSSAQNRKYTIKVEVPKGAWRSYLNMELTIPIFATNSDCELIVKAMQGLLKDGNPIPSAIAANSGIYKRTADGSEFESPKKKAKVE

SEQ ID NO: 19399 - protein, 2376 aa, synthetic construct
PAAKRVKLDGGDTSNLMEQILSSDNLNRAYLQVVRNKGAEGVDGMKYTELKEHLAKNGETIKGQLRTRKYKPQPARRVEIPKPDGGVRNLGVPTVTDRFIQQAIAQVLTPIYEEQFHDHSYGFRPNRCAQQAILTALNIMNDGNDWIVDIDLEKFFDTVNHDKLMTLIGRTIKDGDVISIVRKYLVSGIMIDDEYEDSIVGTPQGGNLSPLLANIMLNELDKEMEKRGLNFVRYADDCIIMVGSEMSANRVMRNISRFIEEKLGLKVNMTKSKVDRPSGLKYLGFGFYFDPRAHQFKAKPHAKSVAKFKKRMKELTCRSWGVSNSYKVEKLNQLIRGWINYFKIGSMKTLCKELDSRIRYRLRMCIWKQWKTPQNQEKNLVKLGIDRNTARRVAYTGKRIAYVCNKGAVNVAISNKRLASFGLISMLDYYIEKCVTCAEAAAKEAAAKEAAAKEAAAKALEAEAAAKEAAAKEAAAKEAAAKAMASNFTQFVLVDNGGTGDVTVAPSNFANGIAEWISSNSRSQAYKVTCSVRQSSAQNRKYTIKVEVPKGAWRSYLNMELTIPIFATNSDCELIVKAMQGLLKDGNPIPSAIAANSGIYGGSGGSMASNFTQFVLVDNGGTGDVTVAPSNFANGIAEWISSNSRSQAYKVTCSVRQSSAQNRKYTIKVEVPKGAWRSYLNMELTIPIFATNSDCELIVKAMQGLLKDGNPIPSAIAANSGIYGGGSGGGSGGGSGGGSMASNFTQFVLVDNGGTGDVTVAPSNFANGIAEWISSNSRSQAYKVTCSVRQSSAQNRKYTIKVEVPKGAWRSYLNMELTIPIFATNSDCELIVKAMQGLLKDGNPIPSAIAANSGIYGGSGGSMASNFTQFVLVDNGGTGDVTVAPSNFANGIAEWISSNSRSQAYKVTCSVRQSSAQNRKYTIKVEVPKGAWRSYLNMELTIPIFATNSDCELIVKAMQGLLKDGNPIPSAIAANSGIYGSSGGGEAAAKDKKYSIGLDIGTNSVGWAVITDEYKVPSKKFKVLGNTDRHSIKKNLIGALLFDSGETAEATRLKRTARRRYTRRKNRICYLQEIFSNEMAKVDDSFFHRLEESFLVEEDKKHERHPIFGNIVDEVAYHEKYPTIYHLRKKLVDSTDKADLRLIYLALAHMIKFRGHFLIEGDLNPDNSDVDKLFIQLVQTYNQLFEENPINASGVDAKAILSARLSKSRRLENLIAQLPGEKKNGLFGNLIALSLGLTPNFKSNFDLAEDAKLQLSKDTYDDDLDNLLAQIGDQYADLFLAAKNLSDAILLSDILRVNTEITKAPLSASMIKRYDEHHQDLTLLKALVRQQLPEKYKEIFFDQSKNGYAGYIDGGASQEEFYKFIKPILEKMDGTEELLVKLNREDLLRKQRTFDNGSIPHQIHLGELHAILRRQEDFYPFLKDNREKIEKILTFRIPYYVGPLARGNSRFAWMTRKSEETITPWNFEEVVDKGASAQSFIERMTNFDKNLPNEKVLPKHSLLYEYFTVYNELTKVKYVTEGMRKPAFLSGEQKKAIVDLLFKTNRKVTVKQLKEDYFKKIECFDSVEISGVEDRFNASLGTYHDLLKIIKDKDFLDNEENEDILEDIVLTLTLFEDREMIEERLKTYAHLFDDKVMKQLKRRRYTGWGRLSRKLINGIRDKQSGKTILDFLKSDGFANRNFMQLIHDDSLTFKEDIQKAQVSGQGDSLHEHIANLAGSPAIKKGILQTVKVVDELVKVMGRHKPENIVIEMARENQTTQKGQKNSRERMKRIEEGIKELGSQILKEHPVENTQLQNEKLYLYYLQNGRDMYVDQELDINRLSDYDVDHIVPQSFLKDDSIDNKVLTRSDKARGKSDNVPSEEVVKKMKNYWRQLLNAKLITQRKFDNLTKAERGGLSELDKAGFIKRQLVETRQITKHVAQILDSRMNTKYDENDKLIREVKVITLKSKLVSDFRKDFQFYKVREINNYHHAHDAYLNAVVGTALIKKYPKLESEFVYGDYKVYDVRKMIAKSEQEIGKATAKYFFYSNIMNFFKTEITLANGEIRKRPLIETNGETGEIVWDKGRDFATVRKVLSMPQVNIVKKTEVQTGGFSKESILPKRNSDKLIARKKDWDPKKYGGFDSPTVAYSVLVVAKVEKGKSKKLKSVKELLGITIMERSSFEKNPIDFLEAKGYKEVKKDLIIKLPKYSLFELENGRKRMLASAGELQKGNELALPSKYVNFLYLASHYEKLKGSPEDNEQKQLFVEQHKHYLDEIIEQISEFSKRVILADANLDKVLSAYNKHRDKPIREQAENIIHLFTLTNLGAPAAFKYFDTTIDRKRYTSTKEVLDATLIHQSITGLYETRIDLSQLGGDKRTADGSEFESPKKKAKVE

SEQ ID NO: 19400 - protein, 117 aa, synthetic construct; identical to SEQ ID NO: 18002

SEQ ID NO: 19401 - protein, 117 aa, synthetic construct; identical to SEQ ID NO: 18002

SEQ ID NO: 19402 - protein, 232 aa, synthetic construct; identical to SEQ ID NO: 18005
